(19) United States
(12) Patent Application Publication
(10) Pub. No.: US 2024/0218063 A1
(43) Pub. Date: Jul. 4, 2024

(54) DLL3 TARGETING TRISPECIFIC PROTEINS AND METHODS OF USE

(71) Applicant: Harpoon Therapeutics, Inc., South San Francisco, CA (US)

(72) Inventors: Holger WESCHE, San Francisco, CA (US); Liping SUN, San Ramon, CA (US)

(21) Appl. No.: 18/525,463

(22) Filed: Nov. 30, 2023

Related U.S. Application Data
(63) Continuation of application No. PCT/US2022/031919, filed on Jun. 2, 2022.
(60) Provisional application No. 63/345,150, filed on May 24, 2022.
(60) Provisional application No. 63/288,939, filed on Dec. 13, 2021.
(60) Provisional application No. 63/196,619, filed on Jun. 3, 2021.

(51) Int. Cl. C07K 16/28; A61K 39/00; A61P 35/00; C07K 16/18

(52) U.S. Cl. CPC C07K 16/28; A61P 35/00; C07K 16/18; C07K 16/2809; A61K 39/00; A61K 2039/505; C07K 2317/31; C07K 2317/569; C07K 2317/622

(57) ABSTRACT

Provided herein are DLL3 binding proteins and DLL3 targeting multispecific proteins (e.g., DLL3 targeting trispecific protein) comprising a domain binding to CD3, a half-life extension domain, and a domain binding to DLL3 (such as a DLL3 binding protein as provided herein). Also provided are pharmaceutical compositions thereof, as well as nucleic acids, recombinant expression vectors and host cells for making such DLL3 binding proteins, DLL3 targeting trispecific proteins. Also disclosed are methods of using the disclosed DLL3 binding proteins, DLL3 targeting trispecific proteins in the prevention, and/or treatment diseases, conditions and disorders.

### CROSS-REFERENCE

[0001] This patent application is a continuation application of International Application NO: PCT/US2022/031919, filed Jun. 2, 2022; and claims the benefit of U.S. Provisional Patent Application No. 63/196,619 filed Jun. 3, 2021; U.S. Provisional Patent Application No. 63/288,939 filed Dec. 13, 2021; and U.S. Provisional Patent Application No. 63/345,150 filed May 24, 2022; each of which is incorporated herein by reference in its entirety.

### SEQUENCE LISTING

[0002] The instant application contains a Sequence Listing which has been submitted electronically in XML file format and is hereby incorporated by reference in its entirety. Said XML copy, created on Feb. 13, 2024, is named 47517-758_301_SL.xml and is 2,430,862 bytes in size.

### BACKGROUND OF THE INVENTION

[0003] The selective destruction of an individual cell or a specific cell type is often desirable in a variety of clinical settings. For example, it is a primary goal of cancer therapy to specifically destroy tumor cells, while leaving healthy cells and tissues intact and undamaged. One such method is by inducing an immune response against the tumor, to make immune effector cells such as natural killer (NK) cells or cytotoxic T lymphocytes (CTLs) attack and destroy tumor cells.

### SUMMARY OF THE INVENTION

[0004] Described herein is a method of treating cancer, the method comprising administration of an effective amount of a Delta Like Ligand 3 (DLL3) targeting trispecific protein to a subject, wherein said protein comprises (a) a first domain (A) which specifically binds to human CD3; (b) a second domain (B) which is a half-life extension domain; and (c) a third domain (C) which specifically binds to DLL3, wherein the DLL3 targeting trispecific protein is administered at a dosage of from about 1 μg to about 100 mg. In some embodiments, the DLL3 targeting trispecific protein is administered at a dosage of from about 1 μg to about 14 mg. In some embodiments, the DLL3 targeting trispecific protein is administered at a dosage of from about 1 μg to about 5 mg. In some embodiments, the DLL3 targeting trispecific protein is administered at a dosage of from about 1 μg to about 2 mg. In some embodiments, the DLL3 targeting trispecific protein is administered at a dosage of from about 1 μg to about 1 mg. In some embodiments, the DLL3 targeting trispecific protein is administered at a dosage of from about 15 μg to about 3600 μg. In some embodiments, the DLL3 targeting trispecific protein is administered at a dosage of about 15 μg. In some embodiments, the DLL3 targeting trispecific protein is administered at a dosage of about 45 μg. In some embodiments, the DLL3 targeting trispecific protein is administered at a dosage of about 135 μg. In some embodiments, the DLL3 targeting trispecific protein is administered at a dosage of about 405 μg. In some embodiments, the DLL3 targeting trispecific protein is administered at a dosage of about 1215 μg. In some embodiments, the DLL3 targeting trispecific protein is administered at a dosage of about 3600 μg. In some embodiments, the DLL3 targeting trispecific protein is administered at a dosage of about 5 mg. In some embodiments, the DLL3 targeting trispecific protein is administered at a dosage of about 7 mg. In some embodiments, the DLL3 targeting trispecific protein is administered at a dosage of about 10 mg. In some embodiments, the DLL3 targeting trispecific protein is administered at a dosage of about 12 mg. In some embodiments, the DLL3 targeting trispecific protein is administered at a dosage of about 14 mg. In some embodiments, the DLL3 targeting trispecific protein is administered at a dosage of about 20 mg. In some embodiments, the DLL3 targeting trispecific protein is administered at a dosage of about 50 mg. In some embodiments, the DLL3 targeting trispecific protein is administered once a week. In some embodiments, the DLL3 targeting trispecific protein is administered twice per week. In some embodiments, the DLL3 targeting trispecific protein is administered every other week. In some embodiments, the DLL3 targeting trispecific protein is administered every three weeks. In some embodiments, the DLL3 targeting trispecific protein is administered intravenously, intraperitoneally, subcutaneously, intramuscularly, topically or intradermally.

[0005] Described herein is a method of treating cancer, the method comprising administration of an effective amount of a DLL3 targeting trispecific protein to a subject, wherein said protein comprises (a) a first domain (A) which specifically binds to human CD3; (b) a second domain (B) which is a half-life extension domain; and (c) a third domain (C) which specifically binds to DLL3, wherein the domains are linked in the order H₂N-(A)-(B)—(C)—COOH, or by linkers L1 and L2, and wherein the DLL3 targeting trispecific protein is administered according to a schedule comprising the following steps: (i) administration of a first dose of the DLL3 targeting trispecific protein, and (ii) administration of a second dose of the DLL3 targeting trispecific protein, wherein the second dose is higher than the first dose. In some embodiments, the first dose is about 1 mg to about 100 mg. In some embodiments, the first dose is about 1 mg to about 50 mg. In some embodiments, the first dose is about 1 mg to about 20 mg. In some embodiments, the first dose is about 1 mg to about 10 mg. In some embodiments, the first dose is about 1 mg to about 5 mg. In some embodiments, the first dose is about 1 mg to about 3 mg. In some embodiments, the first dose is about 2000 μg. In some embodiments, the first dose is about 3600 μg. In some embodiments, the first dose is administered for about 1 week to about 36 weeks. In some embodiments, the first dose is administered for about 1 week to about 27 weeks. In some embodiments, the first dose is administered for about 1 week to about 18 weeks. In some embodiments, the first dose is administered for about 1 week to about 9 weeks. In some embodiments, the first dose is administered once a day. In some embodiments, the first dose is administered twice a day. In some embodiments, the first dose is administered three times a day. In some embodiments, the first dose is administered five times a day. In some embodiments, the first dose is administered once a week. In some embodiments, the first dose is administered twice per week. In some embodiments, the first dose is administered every other week. In some embodiments, first dose is administered every three weeks. In some embodiments, the first dose is administered intravenously, intraperitoneally, subcutaneously, intramuscularly, topically or intradermally. In some embodiments, the second dose is about 1 mg to about 100 mg. In some embodiments, the second dose is about 1 mg to about 50 mg. In some embodiments, the second dose is about 50 mg to about 100 mg. In some embodiments, the second dose is about 7.2 mg. In some embodiments, the second dose is about 12 mg. In some embodiments, the second dose is about 24 mg. In some embodiments, the second dose is about 36 mg. In some embodiments, the second dose is administered for about 1 week to about 36 weeks. In some embodiments, the second dose is administered for about 1 week to about 27 weeks. In some embodiments, the second dose is administered for about 1 week to about 18 weeks. In some embodiments, the second dose is administered for about 1 week to about 9 weeks. In some embodiments, the second dose is administered once a day. In some embodiments, the second dose is administered twice a day. In some embodiments, the second dose is administered three times a day. In some embodiments, the second dose is administered five times a day. In some embodiments, the second dose is administered once a week. In some embodiments, the second dose is administered twice per week. In some embodiments, the second dose is administered every other week. In some embodiments, the second dose is administered every three weeks. In some embodiments, the second dose is maintained to the end of the schedule after the administration of the first dose. In some embodiments, the second dose is administered intravenously, intraperitoneally, subcutaneously, intramuscularly, topically or intradermally.

[0006] In some embodiments, the DLL3 targeting trispecific protein has an elimination half-time of at least 12 hours, at least 20 hours, at least 25 hours, at least 30 hours, at least 35 hours, at least 40 hours, at least 45 hours, at least 50 hours, or at least 100 hours. In some embodiments, the third domain comprises a VHH domain. In some embodiments, the VHH domain is human, humanized, affinity matured, or a combination thereof. In some embodiments, the third domain comprises one or more sequences selected from the group consisting of SEQ ID NO: 1-442. In some embodiments, the first domain comprises a variable light chain and variable heavy chain each of which is capable of specifically binding to human CD3. In some embodiments, the first domain is humanized or human. In some embodiments, the second domain binds human serum albumin. In some embodiments, the second domain comprises a scFv, a variable heavy domain (VH), a variable light domain (VL), a peptide, a ligand, or a small molecule. In some embodiments, linkers L1 and L2 are each, independently, selected from (GS)ₙ (SEQ ID NO: 1809), (GGS)ₙ (SEQ ID NO: 1810), (GGGS)ₙ (SEQ ID NO: 1811), (GGSG)ₙ (SEQ ID NO: 1812), (GGSGG)ₙ (SEQ ID NO: 1813), (GGGGS)ₙ (SEQ ID NO: 1814), or GGGGSGGGS (SEQ ID NO: 1808), wherein n is 1, 2, 3, 4, 5, 6, 7, 8, 9, or 10. In some embodiments, linkers L1 and L2 are each, independently, (GGGGS)₄ (SEQ ID NO: 1817), (GGGGS)₃ (SEQ ID NO: 1818) or GGGGSGGGS (SEQ ID NO: 1808). In some embodiments, the domains are linked in the order H₂N—(C)-L1-(B)-L2-(A)-COOH. In some embodiments, the DLL3 targeting trispecific protein is less than about 80 kDa. In some embodiments, the DLL3 targeting trispecific protein is about 50 to about 75 kDa. In some embodiments, the DLL3 targeting trispecific protein is less than about 60 kDa. In some embodiments, the DLL3 targeting trispecific protein comprises a sequence selected from the group consisting of SEQ ID NO: 1890-1891. In some embodiments, the DLL3 targeting trispecific protein comprises a sequence as set forth in SEQ ID NO: 1890. In some embodiments, the cancer is a tumorous disease, an autoimmune disease or an infection disease associated with DLL3. In some embodiments, the cancer is a neuroendocrine cancer, a prostate cancer, a lung cancer, a stomach cancer, a squamous cell carcinoma, a pancreatic cancer, a cholangiocarcinoma, a triple negative breast cancer or an ovarian cancer. In some embodiments, the cancer is a small cell lung cancer. In some embodiments, the cancer is a neuroendocrine prostate cancer.

### INCORPORATION BY REFERENCE

[0007] All publications, patents, and patent applications mentioned in this specification are herein incorporated by reference to the same extent as if each individual publication, patent, or patent application was specifically and individually indicated to be incorporated by reference.

### BRIEF DESCRIPTION OF THE DRAWINGS

[0008] The novel features of the invention are set forth with particularity in the appended claims. A better understanding of the features and advantages of the present invention will be obtained by reference to the following detailed description that sets forth illustrative embodiments, in which the principles of the invention are utilized, and the accompanying drawings of which:

[0009] FIG. 1 illustrates the various domains of an exemplary DLL3 targeting trispecific protein of this disclosure.

[0010] FIG. 2 illustrates results of a T cell dependent cellular cytotoxicity (TDCC) assay on DMS-153 cells, using exemplary DLL3 targeting trispecific proteins containing DLL3 binding domains of this disclosure, DH18, DH11, DH67, and DH56.

[0011] FIG. 3 illustrates results of a TDCC assay on DMS-153 cells, using exemplary DLL3 targeting trispecific proteins containing exemplary DLL3 binding domains of this disclosure DH2, DH43, DH10, and DH6.

[0012] FIG. 4 illustrates results of a TDCC assay on DMS-153 cells, using exemplary DLL3 targeting trispecific proteins containing exemplary DLL3 binding domains of this disclosure DH82, DH23, DH89, and DH17.

[0013] FIG. 5 illustrates results of a TDCC assay on DMS-153 cells, using exemplary DLL3 targeting trispecific proteins containing exemplary DLL3 binding domains of this disclosure DH83, DH12, DH61, and DH29.

[0014] FIG. 6 illustrates results of a TDCC assay on DMS-153 cells, using exemplary DLL3 targeting trispecific proteins containing exemplary DLL3 binding domains of this disclosure DH58, and DH70, and a control trispecific protein.

[0015] FIG. 7 illustrates results of a TDCC assay on DMS-153 cells, using exemplary affinity matured DLL3 targeting trispecific proteins containing exemplary DLL3 targeting domains of this disclosure 1A011, 2E05, 1H012, 2E02, and 1C03.

[0016] FIG. 8 illustrates results of a TDCC assay on DMS-153 cells, using exemplary affinity matured DLL3 binding trispecific proteins containing exemplary DLL3 targeting domains of this disclosure 2E010, 2E01, 2H02, 2A04, and 2F11.

[0017] FIG. 9 illustrates results of a TDCC assay on DMS-153 cells, using exemplary affinity matured DLL3 binding trispecific proteins containing exemplary DLL3 targeting domains of this disclosure 2E011, 3C04, 4H04, 4H011, and 4D09.

[0018] FIG. 10 illustrates results of a TDCC assay on DMS-153 cells, using exemplary affinity matured DLL3 binding trispecific proteins containing exemplary DLL3 targeting domains of this disclosure 4B07, 4E02, 4C06, 3H011, and 3D07.

[0019] FIG. 11 illustrates results of a TDCC assay on DMS-153 cells, using exemplary affinity matured DLL3 targeting trispecific proteins containing exemplary DLL3 binding domains of this disclosure 3H06, and 4B011, and parental DLL binder domains DH43, DH6, and a control trispecific protein.

[0020] FIG. 12 illustrates results of a TDCC assay on DMS-153 cells, using exemplary purified affinity matured CHO expressed DLL3 binding trispecific proteins containing exemplary DLL3 targeting domains of this disclosure 2E05-M106Y, 2E05-M106Q, 4D09-M34L, and 4H11-M34L.

[0021] FIG. 13 illustrates results of a TDCC assay on DMS-153 cells, using exemplary purified affinity matured CHO expressed DLL3 targeting trispecific proteins containing exemplary DLL3 binding domains of this disclosure 1A011 (labelled as TAll on FIG. 13), 1H012 (labelled as 1H12 on FIG. 13), 2E02, and 2E05.

[0022] FIG. 14 illustrates results of a TDCC assay on DMS-153 cells, using exemplary purified affinity matured CHO expressed DLL3 targeting trispecific proteins containing exemplary DLL3 binding domains of this disclosure 2H02, 3C04, 4D09, and 4H11.

[0023] FIG. 15 illustrates results of a TDCC assay on DMS-153 cells, using exemplary purified DLL3 targeting trispecific proteins containing parental exemplary DLL3 binding domains DH43 and DH6, and a control trispecific protein that targets GFP.

[0024] FIG. 16 illustrates results of a TDCC assay DMS-153 cells, using exemplary DLL3 targeting trispecific proteins containing exemplary DLL3 binding domains of this disclosure from second round of affinity maturation.

[0025] FIG. 17 illustrates an image of a 10-20% TRIS Glycine SDS-PAGE loaded with 2.4 micrograms of non-reduced protein per lane and stained with Coomassie. The lane numbers are indicated by the numbers at the top of the gel image and the migration of molecular weight standards are indicated by the number on the right side of the gel image (in kilodaltons). Gel loading: Lane 1 empty, lane 2 molecular weight standard, lane 3 empty, lane 4 anti-DLL3 trispecific containing DLL3 binding domain 51G2, lane 5 anti-DLL3 trispecific containing DLL3 binding domain 51G10, lane 6 anti-DLL3 trispecific containing DLL3 binding domain 51H5, lane 7 anti-DLL3 trispecific containing DLL3 binding domain 51X5, lane 8 anti-DLL3 trispecific containing DLL3 binding domain 52B1, lane 9 anti-DLL3 trispecific containing DLL3 binding domain 52C4, lane 10 anti-DLL3 trispecific containing DLL3 binding domain 52D4, lane 11 anti-DLL3 trispecific containing DLL3 binding domain 51A2, lane 12 containing DLL3 binding domain anti-DLL3 trispecific 51A5, lane 13 anti-DLL3 trispecific containing DLL3 binding domain 51F3, lane 14 empty, and lane 15 empty.

[0026] FIG. 18 illustrates results of a TDCC assay on DMS-53 cells, using exemplary purified affinity matured CHO expressed DLL3 targeting trispecific proteins containing exemplary DLL3 binding domains of this disclosure 51G2, 51G10, 51H5, 51X5, 52B1, 52C4, 52D4, 51A2, and parental DLL3 binder domain DH6, and a control trispecific protein.

[0027] FIG. 19 illustrates results of a TDCC assay on DMS-153 cells, using exemplary purified affinity matured CHO expressed DLL3 targeting trispecific proteins of this disclosure, containing exemplary DLL3 binding domains of this disclosure 51G2, 51G10, 51H5, 51X5, 52B1, 52C4, 52D4, 51A2, and parental DLL3 binder domain DH6, and a control binding trispecific protein that targets GFP.

[0028] FIG. 20 provides a schematic illustration of a DLL3 targeting trispecific protein containing an exemplary DLL3 binding protein of this disclosure (DLL3 binder), a CD3 binding domain (anti-CD3 epsilon scFv), and an albumin binding (anti-ALB) domain, in an anti-DLL3: anti-ALB: anti-CD3 orientation (TAC orientation).

[0029] FIG. 21 provides a schematic illustration of a DLL3 targeting trispecific protein containing an exemplary DLL3 binding protein of this disclosure (DLL3 binder), a CD3 binding domain (anti-CD3 epsilon scFv), and an albumin binding (anti-ALB) domain, in an anti-CD3: anti-ALB: anti-DLL3 orientation (CAT orientation).

[0030] FIG. 22 illustrates results of a T cell dependent cellular cytotoxicity (TDCC) assay on NCI-H2171cells, using exemplary DLL3 trispecific proteins containing a DLL3 binding domain of this disclosure, 52D04, in an anti-CD3:anti-ALB:anti-DLL3 (CAT) configuration or in an anti-DLL3:anti-ALB:anti-CD3 (TAC) configuration, tested in the presence of human serum albumin (HSA) or bovine serum albumin (BSA).

[0031] FIG. 23 illustrates results of a T cell dependent cellular cytotoxicity (TDCC) assay on DMS-79 cells, using exemplary DLL3 targeting trispecific proteins containing a DLL3 binding domain of this disclosure, 52D04, in an anti-CD3:anti-ALB:anti-DLL3 (CAT) configuration or in an anti-DLL3:anti-ALB:anti-CD3 (TAC) configuration, tested in the presence or absence of human serum albumin (HSA).

[0032] FIG. 24 illustrates results of a T cell dependent cellular cytotoxicity (TDCC) assay on SHP77 cells, using exemplary DLL3 trispecific proteins containing a DLL3 binding domain of this disclosure, 52D04, in an anti-CD3:anti-ALB:anti-DLL3 (CAT) configuration or in an anti-DLL3:anti-ALB:anti-CD3 (TAC) configuration, tested in the presence of human serum albumin (HSA) or bovine serum albumin (BSA).

[0033] FIG. 25 illustrates results of a T cell dependent cellular cytotoxicity (TDCC) assay on WM2664 cells, using exemplary DLL3 trispecific proteins containing a DLL3 binding domain of this disclosure, 52D04, in an anti-CD3:anti-ALB:anti-DLL3 (CAT) configuration or in an anti-DLL3:anti-ALB:anti-CD3 (TAC) configuration, tested in the presence of human serum albumin (HSA) or bovine serum albumin (BSA).

[0034] FIG. 26 depicts binding of an exemplary DLL3 targeting trispecific proteins containing DLL3 binding domain of this disclosure, 52D04, in an anti-DLL3:anti-ALB:anti-CD3 (TAC) configuration to human T cells from four different donors as compared to that of a controls with secondary antibody alone or cells without any antibody or trispecific molecule.

[0035] FIG. 27 depicts binding of an exemplary DLL3 targeting trispecific proteins containing DLL3 binding domain of this disclosure, 52D04, in an anti-CD3:anti-ALB:anti-DLL3 (CAT) configuration to human T cells from four different donors as compared to that of a controls with secondary antibody alone or cells without any antibody or trispecific molecule.

[0036] FIG. 28 depicts binding of an exemplary DLL3 targeting trispecific proteins containing DLL3 binding domain of this disclosure, 52D04, in an anti-DLL3:anti-ALB:anti-CD3 (TAC) configuration to human DLL3 expressing cell lines NCI-H82 (top left), SHP77 (top right), DMS53 (bottom left) or NCI-H2171 (bottom right) compared to a trispecific molecules with an GFP binding domain.

[0037] FIG. 29 depicts binding of an exemplary DLL3 targeting trispecific proteins containing DLL3 binding domain of this disclosure, 52D04, in an anti-CD3:anti-ALB:anti-DLL3 (CAT) configuration to human DLL3 expressing cell lines NCI-H82 (top left), SHP77 (top right), DMS53 (bottom left) or NCI-H2171 (bottom right) compared to a trispecific molecules with an GFP binding domain.

[0038] FIG. 30 illustrates the results of a TDCC assay on NCI-H82 cells, using exemplary DLL3 targeting trispecific proteins containing DLL3 binding domain of this disclosure, 52D04, in an anti-DLL3:anti-ALB:anti-CD3 (TAC) configuration, tested in the presence of human serum albumin (HSA), using T cells from four different donors.

[0039] FIG. 31 illustrates the results of a TDCC assay on SHP77 cells, using exemplary DLL3 targeting trispecific proteins containing DLL3 binding domain of this disclosure, 52D04, in an anti-DLL3:anti-ALB:anti-CD3 (TAC) configuration, tested in the presence of human serum albumin (HSA), using T cells from four different donors.

[0040] FIG. 32 illustrates the results of a TDCC assay on DMS53 cells, using exemplary DLL3 targeting trispecific proteins containing DLL3 binding domain of this disclosure, 52D04, in an anti-DLL3:anti-ALB:anti-CD3 (TAC) configuration, tested in the presence of human serum albumin (HSA), using T cells from four different donors.

[0041] FIG. 33 illustrates the results of a TDCC assay on NCI-H2171 cells, using exemplary DLL3 targeting trispecific proteins containing DLL3 binding domain of this disclosure, 52D04, in an anti-DLL3:anti-ALB:anti-CD3 (TAC) configuration, tested in the presence of human serum albumin (HSA), using T cells from four different donors.

[0042] FIG. 34 illustrates the results of a TDCC assay on NCI-H82 cells, using exemplary DLL3 targeting trispecific proteins containing DLL3 binding domain of this disclosure, 52D04, in an anti-CD3:anti-ALB:anti-DLL3 (CAT) configuration, tested in the presence of human serum albumin (HSA), using T cells from four different donors.

[0043] FIG. 35 illustrates the results of a TDCC assay on SHP77 cells, using exemplary DLL3 targeting trispecific proteins containing DLL3 binding domain of this disclosure, 52D04, in an anti-CD3:anti-ALB:anti-DLL3 (CAT) configuration, tested in the presence of human serum albumin (HSA), using T cells from four different donors.

[0044] FIG. 36 illustrates the results of a TDCC assay on DMS53 cells, using exemplary DLL3 targeting trispecific proteins containing DLL3 binding domain of this disclosure, 52D04, in an anti-CD3:anti-ALB:anti-DLL3 (CAT) configuration, tested in the presence of human serum albumin (HSA), using T cells from four different donors.

[0045] FIG. 37 illustrates the results of a TDCC assay on NCI-H2171 cells, using exemplary DLL3 targeting trispecific proteins containing DLL3 binding domain of this disclosure, 52D04, in an anti-CD3:anti-ALB:anti-DLL3 (CAT) configuration, tested in the presence of human serum albumin (HSA), using T cells from four different donors.

[0046] FIG. 38 illustrates the results of a flow cytometry measurements of CD69 expression on T cells co-cultured with NCI-H82 cells with a titration of an exemplary DLL3 targeting trispecific proteins containing DLL3 binding domain of this disclosure, 52D04, in an anti-DLL3:anti-ALB:anti-CD3 (TAC) configuration, tested in the presence of human serum albumin (HSA), using T cells from four different donors.

[0047] FIG. 39 illustrates the results of a flow cytometry measurements of CD25 expression on T cells co-cultured with NCI-H82 cells with a titration of an exemplary DLL3 targeting trispecific proteins containing DLL3 binding domain of this disclosure, 52D04, in an anti-DLL3:anti-ALB:anti-CD3 (TAC) configuration, tested in the presence of human serum albumin (HSA), using T cells from four different donors.

[0048] FIG. 40 illustrates the results of a flow cytometry measurements of CD69 expression on T cells co-cultured with DMS53 cells with a titration of an exemplary DLL3 targeting trispecific proteins containing DLL3 binding domain of this disclosure, 52D04, in an anti-DLL3:anti-ALB:anti-CD3 (TAC) configuration, tested in the presence of human serum albumin (HSA, using T cells from four different donors.

[0049] FIG. 41 illustrates the results of a flow cytometry measurements of CD25 expression on T cells co-cultured with DMS53 cells with a titration of an exemplary DLL3 targeting trispecific proteins containing DLL3 binding domain of this disclosure, 52D04, in an anti-DLL3:anti-ALB:anti-CD3 (TAC) configuration, tested in the presence of human serum albumin (HSA).

[0050] FIG. 42 illustrates the results of a flow cytometry measurements of CD69 expression on T cells co-cultured with NCI-H82 cells with a titration of an exemplary DLL3 targeting trispecific proteins containing DLL3 binding domain of this disclosure, 52D04, in an anti-CD3:anti-ALB:anti-DLL3 (CAT) configuration, tested in the presence of human serum albumin (HSA), using T cells from four different donors.

[0051] FIG. 43 illustrates the results of a flow cytometry measurements of CD25 expression on T cells co-cultured with NCI-H82 cells with a titration of an exemplary DLL3 targeting trispecific proteins containing DLL3 binding domain of this disclosure, 52D04, in an anti-CD3:anti-ALB:anti-DLL3 (CAT) configuration, tested in the presence of human serum albumin (HSA), using T cells from four different donors.

[0052] FIG. 44 illustrates the results of a flow cytometry measurements of CD69 expression on T cells co-cultured with DMS53 cells with a titration of an exemplary DLL3 targeting trispecific proteins containing DLL3 binding domain of this disclosure, 52D04, in an anti-CD3:anti-ALB:anti-DLL3 (CAT) configuration, tested in the presence of human serum albumin (HSA), using T cells from four different donors.

[0053] FIG. 45 illustrates the results of a flow cytometry measurements of CD25 expression on T cells co-cultured with DMS53 cells with a titration of an exemplary DLL3 targeting trispecific proteins containing DLL3 binding domain of this disclosure, 52D04, in an anti-CD3:anti-ALB:anti-DLL3 (CAT) configuration, tested in the presence of human serum albumin (HSA).

[0054] FIG. 46 illustrates the results of IFNγ measurements in conditioned media from co-cultures of T cells and NCI-H82 cells incubated with a titration of an exemplary DLL3 targeting trispecific proteins containing DLL3 binding domain of this disclosure, 52D04, in an anti-DLL3:anti-ALB:anti-CD3 (TAC) configuration, tested in the presence of human serum albumin (HSA).

[0055] FIG. 47 illustrates the results of IFNγ measurements in conditioned media from co-cultures of T cells and SHP77 cells incubated with a titration of an exemplary DLL3 targeting trispecific proteins containing DLL3 binding domain of this disclosure, 52D04, in an anti-DLL3:anti-ALB:anti-CD3 (TAC) configuration, tested in the presence of human serum albumin (HSA).

[0056] FIG. 48 illustrates the results of IL-2 measurements in conditioned media from co-cultures of T cells and NCI-H82 cells incubated with a titration of an exemplary DLL3 targeting trispecific proteins containing DLL3 binding domain of this disclosure, 52D04, in an anti-DLL3:anti-ALB:anti-CD3 (TAC) configuration, tested in the presence of human serum albumin (HSA).

[0057] FIG. 49 illustrates the results of IL-2 measurements in conditioned media from co-cultures of T cells and SHP77 cells incubated with a titration of an exemplary DLL3 targeting trispecific proteins containing DLL3 binding domain of this disclosure, 52D04, in an anti-DLL3:anti-ALB:anti-CD3 (TAC) configuration, tested in the presence of human serum albumin (HSA).

[0058] FIG. 50 illustrates the results of TNFα measurements in conditioned media from co-cultures of T cells and NCI-H82 cells incubated with a titration of an exemplary DLL3 targeting trispecific proteins containing DLL3 binding domain of this disclosure, 52D04, in an anti-DLL3:anti-ALB:anti-CD3 (TAC) configuration, tested in the presence of human serum albumin (HSA).

[0059] FIG. 51 illustrates the results of TNFα measurements in conditioned media from co-cultures of T cells and SHP77 cells incubated with a titration of an exemplary DLL3 targeting trispecific proteins containing DLL3 binding domain of this disclosure, 52D04, in an anti-DLL3:anti-ALB:anti-CD3 (TAC) configuration, tested in the presence of human serum albumin (HSA).

[0060] FIG. 52 illustrates the results of IFNγ measurements in conditioned media from co-cultures of T cells and NCI-H82 cells incubated with a titration of an exemplary DLL3 targeting trispecific proteins containing DLL3 binding domain of this disclosure, 52D04, in an anti-CD3:anti-ALB:anti-DLL3 (CAT) configuration, tested in the presence of human serum albumin (HSA).

[0061] FIG. 53 illustrates the results of IFNγ measurements in conditioned media from co-cultures of T cells and SHP77 cells incubated with a titration of an exemplary DLL3 targeting trispecific proteins containing DLL3 binding domain of this disclosure, 52D04, in an anti-CD3:anti-ALB:anti-DLL3 (CAT) configuration, tested in the presence of human serum albumin (HSA).

[0062] FIG. 54 illustrates the results of IL-2 measurements in conditioned media from co-cultures of T cells and NCI-H82 cells incubated with a titration of an exemplary DLL3 targeting trispecific proteins containing DLL3 binding domain of this disclosure, 52D04, in an anti-CD3:anti-ALB:anti-DLL3 (CAT) configuration, tested in the presence of human serum albumin (HSA).

[0063] FIG. 55 illustrates the results of IL-2 measurements in conditioned media from co-cultures of T cells and SHP77 cells incubated with a titration of an exemplary DLL3 targeting trispecific proteins containing DLL3 binding domain of this disclosure, 52D04, in an anti-CD3:anti-ALB:anti-DLL3 (CAT) configuration, tested in the presence of human serum albumin (HSA).

[0064] FIG. 56 illustrates the results of TNFα measurements in conditioned media from co-cultures of T cells and NCI-H82 cells incubated with a titration of an exemplary DLL3 targeting trispecific proteins containing DLL3 binding domain of this disclosure, 52D04, in an anti-CD3:anti-ALB:anti-DLL3 (CAT) configuration, tested in the presence of human serum albumin (HSA).

[0065] FIG. 57 illustrates the results of TNFα measurements in conditioned media from co-cultures of T cells and SHP77 cells incubated with a titration of an exemplary DLL3 targeting trispecific proteins containing DLL3 binding domain of this disclosure, 52D04, in an anti-CD3:anti-ALB:anti-DLL3 (CAT) configuration, tested in the presence of human serum albumin (HSA).

[0066] FIG. 58 depicts that an exemplary DLL3 targeting trispecific proteins containing DLL3 binding domain of this disclosure, 52D04, in an anti-DLL3:anti-ALB:anti-CD3 (TAC) configuration or an anti-CD3:anti-ALB:anti-DLL3 (CAT) configuration, was able to inhibit tumor growth in mice injected with a mixture of human T cells and NCI-H82 small cell lung cancer cells at dosages 20 μg/kg, 100 μg/kg or 500 μg/kg.

[0067] FIG. 59 depicts that an exemplary DLL3 targeting trispecific proteins containing DLL3 binding domain of this disclosure, 52D04, in an anti-CD3:anti-ALB:anti-DLL3 (CAT) configuration, was able to eliminate NCI-H82 xenograft tumors growth in mice injected with human T cells at dosages of 10 μg/kg and 100 μg/kg.

[0068] FIG. 60 depicts that an exemplary DLL3 targeting trispecific proteins containing DLL3 binding domain of this disclosure, 52D04, in an anti-CD3:anti-ALB:anti-DLL3 (CAT) configuration, was able to inhibit tumor growth in mice injected with a mixture of human T cells and SHP77 small cell lung cancer cells at dosages 10 μg/kg and 100 μg/kg.

[0069] FIG. 61 depicts pharmacokinetic profile of exemplary DLL3 targeting trispecific proteins containing DLL3 binding domain of this disclosure, 52D04, in an anti-CD3:anti-ALB:anti-DLL3 (CAT) configuration (ID numbers 1 and 2) or an anti-DLL3:anti-ALB:anti-CD3 (TAC) configuration (ID numbers 3 and 4). Serum levels of the DLL3 targeting trispecific proteins at various time points following injection into cynomolgus monkeys, at 0.3 mg/kg, are shown in the plot.

[0070] FIG. 62 depicts pharmacokinetic profile of an exemplary DLL3 targeting trispecific proteins containing DLL3 binding domain of this disclosure, 52D04, in an anti-CD3:anti-ALB:anti-DLL3 (CAT) configuration, at various time points following injection into cynomolgus monkeys, at 1 mg/kg or 10 mg/kg, are shown in the plot.

[0071] FIG. 63 depicts transient cytokine increase after first dosing of an exemplary DLL3 binding TriTAC molecule of this disclosure at 1 mg/kg and 10 mg/kg or a vehicle control. The top panel shows transient increase of IFNγ, the second panel shows transient increase of IL-6, and third panel show transient increase in IL-10.

[0072] FIG. 64 illustrates the results of a TDCC assay on DMS53 cells, using exemplary DLL3 targeting trispecific proteins containing DLL3 binding domain of this disclosure, 52D04, in an anti-CD3:anti-ALB:anti-DLL3 (CAT) configuration, using freshly thawed protein, or using protein present in a serum sample from a cynomolgus monkey collected 168 h after dosing with 10 mg/kg DLL3 targeting trispecific protein, measured in the presence of 8.4% cynomolgus monkey serum.

[0073] FIG. 65 illustrates DLL3 trispecific antigen-binding protein Phase 1/2 trial design.

[0074] FIG. 66 demonstrates the patient time on treatment, weekly dose per patient, number of prior therapties, and the patient identification number.

[0075] FIG. 67 shows maximum percent target lesion response from baseline in each cohort.

[0076] FIG. 68 illustrates the target lesion reduction over time for a patient.

[0077] FIG. 69 illustrates the pharmacokinetic data of the DLL3 trispecific antigen-binding protein for the different dosing cohorts.

[0078] FIGS. 70A and B demonstrate the result of a flow analysis. FIG. 70A demonstrates the T cell margination level after treatment. FIG. 70B demonstrates the T cell activation marker induction after treatment.

[0079] FIG. 71A demonstrates the target lesion diameter change over time for patient 111. FIG. 71B CT scans illustrate the reduction in sum of target lesion diameters for patient 111.

[0080] FIG. 72A demonstrates the target lesion diameter change over time for patient 112. FIG. 72B CT scans illustrate the reduction in sum of target lesion diameters for patient 112.

[0081] FIG. 73 demonstrates the target lesion diameter change over time for patient 113.

[0082] FIG. 74A shows the concentration-time profile. FIG. 74B shows the Cmax by dose.

[0083] FIG. 75A shows peripheral IL-6 concentration after first and repeat or target dose. FIG. 75B shows peripheral MCP-1 concentration after first and repeat or target dose. FIG. 75C shows CD8+ T cell margination.

### DETAILED DESCRIPTION OF THE INVENTION

[0084] Described herein, in some embodiments, are proteins that specifically bind delta-like ligand 3 (DLL3) and multispecific (e.g., trispecific) containing the same, pharmaceutical compositions thereof, as well as nucleic acids, recombinant expression vectors and host cells for making such proteins thereof. Also provided are methods of using at least one of: the disclosed DLL3 binding proteins, or DLL3 targeting trispecific proteins containing the same, in the prevention, and/or treatment of diseases, conditions and disorders. The DLL3 targeting trispecific proteins are capable of specifically binding to DLL3 as well as CD3 and have a half-life extension domain, such as a domain that is capable of specifically binding to human albumin (ALB). FIG. 1 depicts one non-limiting example of a trispecific DLL3-binding protein. In some embodiments, the DLL3 targeting trispecific protein comprises an antibody, such as a trispecific antibody.

### Certain Definitions

[0085] An “antibody” typically refers to a Y-shaped tetrameric protein comprising two heavy (H) and two light (L) polypeptide chains held together by covalent disulfide bonds and non-covalent interactions. Human light chains comprise a variable domain (VL) and a constant domain (CL) wherein the constant domain may be readily classified as kappa or lambda based on amino acid sequence and gene loci. Each heavy chain comprises one variable domain (VH) and a constant region, which in the case of IgG, IgA, and IgD, comprises three domains termed CH1, CH2, and CH3 (IgM and IgE have a fourth domain, CH4). In IgG, IgA, and IgD classes the CH1 and CH2 domains are separated by a flexible hinge region, which is a proline and cysteine rich segment of variable length (generally from about 10 to about 60 amino acids in IgG). The variable domains in both the light and heavy chains are joined to the constant domains by a “J” region of about 12 or more amino acids and the heavy chain also has a “D” region of about 10 additional amino acids. Each class of antibody further comprises inter-chain and intra-chain disulfide bonds formed by paired cysteine residues. There are two types of native disulfide bridges or bonds in immunoglobulin molecules: interchain and intrachain disulfide bonds. The location and number of interchain disulfide bonds vary according to the immunoglobulin class and species. Interchain disulfide bonds are located on the surface of the immunoglobulin, are accessible to solvent and are usually relatively easily reduced. In the human IgG1 isotype there are four interchain disulfide bonds, one from each heavy chain to the light chain and two between the heavy chains. The interchain disulfide bonds are not required for chain association. As is well known the cysteine rich IgG1 hinge region of the heavy chain has generally been held to consist of three parts: an upper hinge, a core hinge, and a lower hinge. Those skilled in the art will appreciate that that the IgG1 hinge region contain the cysteines in the heavy chain that comprise the interchain disulfide bonds (two heavy/heavy, two heavy/light), which provide structural flexibility that facilitates Fab movements. The interchain disulfide bond between the light and heavy chain of IgG1 are formed between C214 of the kappa or lambda light chain and C220 in the upper hinge region of the heavy chain. The interchain disulfide bonds between the heavy chains are at positions C226 and C229 (all numbered per the EU index according to Kabat, et al., infra.)

[0086] As used herein the term “antibody” includes polyclonal antibodies, multiclonal antibodies, monoclonal antibodies, chimeric antibodies, humanized and primatized antibodies, CDR grafted antibodies, human antibodies, recombinantly produced antibodies, intrabodies, multispecific antibodies, bispecific antibodies, monovalent antibodies, multivalent antibodies, anti-idiotypic antibodies, synthetic antibodies, including muteins and variants thereof, immunospecific antibody fragments such as Fd, Fab, F(ab′)2, F(ab′) fragments, single-chain fragments (e.g., ScFv and ScFvFc), disulfide-linked Fvs (sdFv), a Fd fragment consisting of the VH and CH1 domains, linear antibodies, single domain antibodies such as sdAb (VH, VL, or VHH domains); and derivatives thereof including Fc fusions and other modifications, and any other immunoreactive molecule so long as it comprises a domain having a binding site for preferential association or binding with a DLL3 protein. Moreover, unless dictated otherwise by contextual constraints the term further comprises all classes of antibodies (i.e., IgA, IgD, IgE, IgG, and IgM) and all subclasses (i.e., IgG1, IgG2, IgG3, IgG4, IgA1, and IgA2). Heavy-chain constant domains that correspond to the different classes of antibodies are typically denoted by the corresponding lower case Greek letter alpha, delta, epsilon, gamma, and mu, respectively. Light chains of the antibodies from any vertebrate species can be assigned to one of two clearly distinct types, called kappa (kappa) and lambda (lambda), based on the amino acid sequences of their constant domains.

[0087] In some embodiments, the DLL3 binding domain of the DLL3 targeting trispecific proteins of this disclosure comprise a heavy chain only antibody, such as a VH or a VHH domain. In some cases, the DLL3 binding proteins comprise a heavy chain only antibody that is an engineered human VH domain. In some examples, the engineered human VH domain is produced by panning of phage display libraries. In some embodiments, the DLL3 binding domain of the DLL3 targeting trispecific proteins of this disclosure comprise a VHH. The term “VHH,” as used herein, refers to single chain antibody binding domain devoid of light chain. In some cases, a VHH is derived from an antibody of the type that can be found in Camelidae or cartilaginous fish which are naturally devoid of light chains or to a synthetic and non-immunized VHH which can be constructed accordingly. Each heavy chain comprises a variable region encoded by V-, D- and J exons. A VHH, in some cases, is a natural VHH, such as a Camelid-derived VHH, or a recombinant protein comprising a heavy chain variable domain. In some embodiments, the VHH is derived from a species selected from the group consisting of camels, llamas, vicugnas, guanacos, and cartilaginous fish (such as, but not limited to, sharks). In another embodiment, the VHH is derived from an alpaca (such as, but not limited to, a Huacaya Alpaca or a Suri alpaca).

[0088] As used herein, “Variable region” or “variable domain” refers to the fact that certain portions of the variable domains differ extensively in sequence among antibodies and are used in the binding and specificity of each particular antibody for its particular antigen. However, the variability is not evenly distributed throughout the variable domains of antibodies. It is concentrated in three segments called complementarity-determining regions (CDRs) or hypervariable regions both in the light-chain (VL) and the heavy-chain (VH) variable domains. The more highly conserved portions of variable domains are called the framework (FR). The variable domains of native heavy and light chains each comprise four FR regions, largely adopting a R-sheet configuration, connected by three CDRs, which form loops connecting, and in some cases forming part of, the R sheet structure. The CDRs in each chain are held together in close proximity by the FR regions and, with the CDRs from the other chain, contribute to the formation of the antigen-binding site of antibodies (see Kabat et al., Sequences of Proteins of Immunological Interest, Fifth Edition, National Institute of Health, Bethesda, Md. (1991)). The constant domains are not involved directly in binding an antibody to an antigen, but exhibit various effector functions, such as participation of the antibody in antibody-dependent cellular toxicity. ScFv fragments (for single chain fragment variable), which in some cases are obtained by genetic engineering, associates in a single polypeptide chain, the VH and the VL region of an antibody, separated by a peptide linker.

[0089] In some embodiments of this disclosure, the DLL3 binding domain, such as the DLL3 binding domain of the DLL3 targeting trispecific proteins comprise a single domain antibody, such as heavy chain only antibodies, such as VH or VHH domains, and comprise three CDRs. Such heavy chain only antibodies, in some embodiments, bind DLL3 as a monomer with no dependency on dimerisation with a VL (light chain variable) region for optimal binding affinity. In some embodiments of this disclosure, the CD3 binding domain of the DLL3 targeting trispecific proteins comprises an scFv. In some embodiments of this disclosure, the albumin binding domain of the DLL3 targeting trispecific proteins comprise a heavy chain only antibody, such as a single domain antibody comprising a VH domain or a VHH domain.

[0090] The assignment of amino acids to each domain, framework region and CDR is, in some embodiments, in accordance with one of the numbering schemes provided by Kabat et al. (1991) Sequences of Proteins of Immunological Interest (5th Ed.), US Dept. of Health and Human Services, PHS, NIH, NIH Publication NO: 91-3242; Chothia et al., 1987, PMID: 3681981; Chothia et al., 1989, PMID: 2687698; MacCallum et al., 1996, PMID: 8876650; or Dubel, Ed. (2007) Handbook of Therapeutic Antibodies, 3rd Ed., Wily-VCH Verlag GmbH and Co or AbM (Oxford Molecular/MSI Pharmacopia) unless otherwise noted. It is not intended that CDRs of the present disclosure necessarily correspond to the Kabat numbering convention. In some embodiments of this disclosure, the DLL3 binding proteins comprise single domain antibodies, such as heavy chain only antibodies, such as VH or VHH domains, and comprise three CDRs. Such heavy chain only antibodies, in some embodiments, bind DLL3 as a monomer with no dependency on dimerisation with a VL (light chain variable) region for optimal binding affinity.

[0091] “Variable domain residue numbering as in Kabat” or “amino acid position numbering as in Kabat,” and variations thereof, refers to the numbering system used for heavy chain variable domains or light chain variable domains of the compilation of antibodies in Kabat et al., Sequences of Proteins of Immunological Interest, 5th Ed. Public Health Service, National Institutes of Health, Bethesda, Md. (1991). Using this numbering system, the actual linear amino acid sequence may contain fewer or additional amino acids corresponding to a shortening of, or insertion into, a FR or CDR of the variable domain. For example, a heavy chain variable domain may include a single amino acid insert (residue 52a according to Kabat) after residue 52 of H2 and inserted residues (e.g., residues 82a, 82b, and 82c, etc., according to Kabat) after heavy chain FR residue 82. The Kabat numbering of residues may be determined for a given antibody by alignment at regions of homology of the sequence of the antibody with a “standard” Kabat numbered sequence.

[0092] The term “Framework” or “FR” residues (or regions) refer to variable domain residues other than the CDR or hypervariable region residues as herein defined. A “human consensus framework” is a framework which represents the most commonly occurring amino acid residue in a selection of human immunoglobulin VL or VH framework sequences.

[0093] As used herein, the term “Percent (%) amino acid sequence identity” with respect to a sequence is defined as the percentage of amino acid residues in a candidate sequence that are identical with the amino acid residues in the specific sequence, after aligning the sequences and introducing gaps, if necessary, to achieve the maximum percent sequence identity, and not considering any conservative substitutions as part of the sequence identity. Alignment for purposes of determining percent amino acid sequence identity can be achieved in various ways that are within the skill in the art, for instance, using publicly available computer softwares such as EMBOSS MATCHER, EMBOSS WATER, EMBOSS STRETCHER, EMBOSS NEEDLE, EMBOSS LALIGN, BLAST, BLAST-2, ALIGN or Megalign (DNASTAR) software. Those skilled in the art can determine appropriate parameters for measuring alignment, including any algorithms needed to achieve maximal alignment over the full length of the sequences being compared.

[0094] As used herein, “elimination half-time” is used in its ordinary sense, as is described in Goodman and Gillman's The Pharmaceutical Basis of Therapeutics 21-25 (Alfred Goodman Gilman, Louis S. Goodman, and Alfred Gilman, eds., 6th ed. 1980). Briefly, the term is meant to encompass a quantitative measure of the time course of drug elimination. The elimination of most drugs is exponential (i.e., follows first-order kinetics), since drug concentrations usually do not approach those required for saturation of the elimination process. The rate of an exponential process may be expressed by its rate constant, k, which expresses the fractional change per unit of time, or by its half-time, t1/2 the time required for 50% completion of the process. The units of these two constants are time-1 and time, respectively. A first-order rate constant and the half-time of the reaction are simply related (k×t1/2=0.693) and may be interchanged accordingly. Since first-order elimination kinetics dictates that a constant fraction of drug is lost per unit time, a plot of the log of drug concentration versus time is linear at all times following the initial distribution phase (i.e., after drug absorption and distribution are complete). The half-time for drug elimination can be accurately determined from such a graph.

[0095] As used herein, the term “binding affinity” refers to the affinity of the proteins described in the disclosure to their binding targets and is expressed numerically using “Kd” values. If two or more proteins are indicated to have comparable binding affinities towards their binding targets, then the Kd values for binding of the respective proteins towards their binding targets, are within ±2-fold of each other. If two or more proteins are indicated to have comparable binding affinities towards single binding target, then the Kd values for binding of the respective proteins towards said single binding target, are within +2-fold of each other. If a protein is indicated to bind two or more targets with comparable binding affinities, then the Kd values for binding of said protein to the two or more targets are within +2-fold of each other. In general, a higher Kd value corresponds to a weaker binding. In some embodiments, the “Kd” is measured by a radiolabeled antigen binding assay (RIA) or surface plasmon resonance assays using a BIACORE™-2000 or a BIACORE™-3000 (BIAcore, Inc., Piscataway, N.J.). In certain embodiments, an “on-rate” or “rate of association” or “association rate” or “kon” and an “off-rate” or “rate of dissociation” or “dissociation rate” or “koff” are also determined with the surface plasmon resonance technique using a BIACORE™-2000 or a BIACORE™-3000 (BIAcore, Inc., Piscataway, N.J.). In additional embodiments, the “Kd”, “kon”, and “koff” are measured using the OCTET® Systems (Pall Life Sciences). In an exemplary method for measuring binding affinity using the OCTET® Systems, the ligand, e.g., biotinylated human or cynomolgus DLL3, is immobilized on the OCTET® streptavidin capillary sensor tip surface which streptavidin tips are then activated according to manufacturer's instructions using about 20-50 μg/ml human or cynomolgus DLL3 protein. A solution of PBS/Casein is also introduced as a blocking agent. For association kinetic measurements, DLL3 binding protein variants are introduced at a concentration ranging from about 10 ng/mL to about 100 μg/mL, about 50 ng/mL to about 5 μg/mL, or about 2 ng/mL to about 20 μg/mL. In some embodiments, the DLL3 binding single domain proteins are used at a concentration ranging from about 2 ng/mL to about 20 μg/mL. Complete dissociation is observed in case of the negative control, assay buffer without the binding proteins. The kinetic parameters of the binding reactions are then determined using an appropriate tool, e.g., ForteBio software.

[0096] One embodiment provides a DLL3 binding protein (also referred to herein as an DLL3 binding domain, such as the DLL3 binding domain of a DLL3 trispecific antibody of this disclosure) that comprises a single domain antibody, comprising a CDR1 sequence comprising a sequence selected from the group consisting of SEQ ID NOS: 443-884 and 1887, a CDR2 sequence comprising a sequence selected from the group consisting of SEQ ID NOS: 885-1326 and 1888, and a CDR3 sequence comprising a sequence selected from the group consisting of SEQ ID NOS: 1327-1768 and 1889. It is contemplated that in some embodiments the DLL3 binding protein of this disclosure is fairly small and no more than 25 kD, no more than 20 kDa, no more than 15 kDa, or no more than 10 kDa in some embodiments. In certain instances, the EGFR binding is 5 kDa or less if it is a peptide or a small molecule entity.

[0097] In one aspect, the DLL3 targeting trispecific protein (also referred to herein as a DLL3 binding trispecific protein, a DLL3 trispecific protein, or a DLL3 TriTAC™) comprises (a) a first domain (A) which specifically binds to human CD3; (b) a second domain (B) which is a half-life extension domain; and (c) a third domain (C) which specifically binds to DLL3. The three domains in DLL3 targeting trispecific proteins are arranged in any order. Thus, it is contemplated that the domain order of the DLL3 targeting trispecific proteins are: H₂N-(A)-(B)—(C)—COOH, H₂N-(A)-(C)—(B)—COOH, H₂N—(B)-(A)-(C)—COOH, H₂N—(B)—(C)-(A)-COOH, H₂N—(C)—(B)-(A)-COOH, or H₂N—(C)-(A)-(B)—COOH.

[0098] In some embodiments, the DLL3 targeting trispecific proteins have a domain order of H₂N-(A)-(B)—(C)—COOH. In some embodiments, the DLL3 targeting trispecific proteins have a domain order of H₂N-(A)-(C)—(B)—COOH. In some embodiments, the DLL3 targeting trispecific proteins have a domain order of H₂N—(B)-(A)-(C)—COOH. In some embodiments, the DLL3 targeting trispecific proteins have a domain order of H₂N—(B)—(C)-(A)-COOH. In some embodiments, the DLL3 targeting trispecific proteins have a domain order of H₂N—(C)—(B)-(A)-COOH. In some embodiments, the DLL3 targeting trispecific proteins have a domain order of H₂N—(C)-(A)-(B)—COOH.

[0099] In some embodiments, the DLL3 targeting trispecific proteins have the HSA (also referred to herein as ALB) binding domain as the middle domain, such that the domain order is H₂N-(A)-(B)—(C)—COOH or H₂N—(C)—(B)-(A)-COOH. It is contemplated that in such embodiments where the HSA binding domain as the middle domain, the CD3 and DLL3 binding domains are afforded additional flexibility to bind to their respective targets.

[0100] In some embodiments, the trispecific binding protein comprises a third domain that specifically binds DLL3, which third domain is in some cases a DLL3 binding single domain antibody, which binds to DLL3 with equivalent or better affinity as that of a reference DLL3 binding parental molecule. The third domain in some embodiments comprises an affinity matured DLL3 binding molecule (e.g., an affinity matured DLL3 binding single domain antibody), and is derived from the DLL3 binding parental molecule, comprising one or more amino acid mutations (e.g., a stabilizing mutation, a destabilizing mutation) with respect to the DLL3 binding parental molecule. In some embodiments, the affinity matured DLL3 binding molecule has superior stability with respect to selected destabilizing agents, as that of a reference DLL3 binding parental molecule. In some embodiments, the affinity matured DLL3 binding molecule is identified in a process comprising panning of one or more pre-candidate DLL3 binding molecules derived from one or more DLL3 binding parental molecule, expressed in a phage display library, against a DLL3 protein, such as a human DLL3 protein. The pre-candidate DLL3 binding molecule comprises, in some embodiments, amino acid substitutions in the variable regions, CDRs, or framework residues, relative to a parental molecule.

[0101] As used herein, “Phage display” refers to a technique by which variant polypeptides are displayed as fusion proteins to at least a portion of a coat protein on the surface of phage, filamentous phage, particles. A utility of phage display lies in the fact that large libraries of randomized protein variants can be rapidly and efficiently selected for those sequences that bind to a target molecule with high affinity. Display of peptide and protein libraries on phage has been used for screening millions of polypeptides for ones with specific binding properties. Polyvalent phage display methods have been used for displaying small random peptides and small proteins through fusions to either gene III or gene VIII of filamentous phage. Wells and Lowman, Curr. Opin. Struct. Biol, 3:355-362 (1992), and references cited therein. In monovalent phage display, a protein or peptide library is fused to a gene III or a portion thereof, and expressed at low levels in the presence of wild type gene III protein so that phage particles display one copy or none of the fusion proteins. Avidity effects are reduced relative to polyvalent phage so that selection is on the basis of intrinsic ligand affinity, and phagemid vectors are used, which simplify DNA manipulations. Lowman and Wells, Methods: A companion to Methods in Enzymology, 3:205-0216 (1991).

[0102] In some embodiments, the panning comprises using varying binding times and concentrations to identify DLL3 binding molecules with increased or decreased on-rates, from pre-candidate DLL3 binding molecules. In some embodiments, the panning comprises using varying wash times to identify DLL3 binding molecules with increased or decreased off-rates, from pre-candidate DLL3 molecules. In some embodiments, the panning comprises using both varying binding times and varying wash times. In some embodiments, one or more stabilizing mutations are combined to increase the stability of the affinity matured DLL3 binding molecule, for example, by shuffling to create a second-stage combinatorial library from such mutants and conducting a second round of panning followed by a binding selection.

[0103] In some embodiments, the affinity matured DLL3 binding molecule comprises an equivalent or better affinity to a DLL3 protein (such as human DLL3 protein) as that of a DLL3 binding parental molecule, but that has reduced cross reactivity, or in some embodiments, increased cross reactivity, with selected substances, such as ligands, proteins, antigens, or the like, other than the DLL3 epitope for which the DLL3 binding parental molecule is specific, or is designed to be specific for. In regard to the latter, an affinity matured DLL3 binding molecule, in some embodiments, is more successfully tested in animal models if the affinity matured DLL3 binding molecule is reacted with both human DLL3 and the corresponding target of the animal model, mouse DLL3 or cynomolgus DLL3. In some embodiments, the parental DLL3 binding molecule binds to human DLL3 with an affinity of about 10 nM or less, and to cynomolgus DLL3 with an affinity of about 15 nM or less. In some embodiments, the affinity matured DLL3 binding molecule, identified after one round of panning, binds to human DLL3 with an affinity of about 5 nM or less, and to cynomolgus DLL3 with an affinity of about 7.5 nM or less. In some embodiments, the affinity matured DLL3 binding molecule, identified after two rounds of panning, binds to human DLL3 with an affinity of about 2.5 nM or less, and to cynomolgus DLL3 with an affinity of about 3.5 nM or less.

[0104] In some embodiments, domain A, domain B, and domain C of the trispecific binding protein of this disclosure, are independently antigen-specific binding domain polypeptides that specifically bind to targets, such as targets on diseased cells, or targets on other cells that support the diseased state, such as targets on stromal cells that support tumor growth or targets on immune cells that support disease-mediated immunosuppression. In some examples, the antigen-specific binding domains include antibodies, heavy chain only antibodies, including single chain antibodies, Fabs, Fv, T-cell receptor binding domains, ligand binding domains, receptor binding domains, domain antibodies, single domain antibodies, minibodies, nanobodies, peptibodies, or various other antibody mimics (such as AFFIMERS®, affitins, alphabodies, atrimers, CTLA4-based molecules, adnectins, anticalins, Kunitz domain-based proteins, avimers, knottins, fynomers, DARPINS®, affibodies, affilins, monobodies and armadillo repeat protein-based proteins).

[0105] In some embodiments, the DLL3 targeting trispecific proteins described herein comprise a DLL binding polypeptide having a sequence selected from the group consisting of SEQ ID NOS: 1-442 and 1886, subsequences thereof, and variants thereof. In some embodiments, the trispecific antigen binding protein comprises a DLL3 binding polypeptide (i.e., the third domain (C)) having at least 70%-95% or more homology to a sequence selected from SEQ ID NOS: 1-442 and 1886, subsequences thereof, and variants thereof. In some embodiments, the trispecific antigen binding protein comprises a DLL3 binding polypeptide (i.e., the third domain (C)) having at least 70%, 75%, 80%, 85%, 90%, 95%, 96%, 97%, 98%, 99%, or more homology to a sequence selected from the group consisting of SEQ ID NOS: 1-442 and 1886, subsequences thereof, and variants thereof. In some embodiments, the trispecific antigen binding protein comprises a DLL3 binding polypeptide (i.e., the third domain (C)) having at least 70%-95% or more identity to a sequence selected from SEQ ID NOS: 1-442 and 1886, subsequences thereof, and variants thereof. In some embodiments, the trispecific antigen binding protein comprises a DLL3 binding polypeptide (i.e., the third domain (C)) having at least 70%, 75%, 80%, 85%, 90%, 91%, 92%, 93%, 94%, 95%, 96%, 97%, 98%, 99% or more identity to a sequence selected from the group consisting of SEQ ID NOS: 1-442 and 1886, subsequences thereof, and variants thereof.

[0106] The DLL3 targeting trispecific proteins described herein are designed to allow specific targeting of cells expressing DLL3 by recruiting cytotoxic T cells. In some embodiments, this improves efficacy compared to ADCC (antibody dependent cell-mediated cytotoxicity), which is using full length antibodies directed to a sole antigen and is not capable of directly recruiting cytotoxic T cells. In contrast, by engaging CD3 molecules expressed specifically on these cells, the DLL3 targeting trispecific proteins can crosslink cytotoxic T cells with cells expressing DLL3 in a highly specific fashion, thereby directing the cytotoxic potential of the T cell towards the target cell. The DLL3 targeting trispecific proteins described herein engage cytotoxic T cells via binding to the surface-expressed CD3 proteins, which form part of the TCR. Simultaneous binding of several DLL3 trispecific antigen-binding protein to CD3 and to DLL3 expressed on the surface of particular cells causes T cell activation and mediates the subsequent lysis of the particular DLL3 expressing cell. Thus, DLL3 targeting trispecific proteins are contemplated to display strong, specific and efficient target cell killing. In some embodiments, the DLL3 targeting trispecific proteins described herein stimulate target cell killing by cytotoxic T cells to eliminate pathogenic cells (e.g., tumor cells expressing DLL3). In some of such embodiments, cells are eliminated selectively, thereby reducing the potential for toxic side effects.

[0107] The DLL3 targeting trispecific proteins described herein confer further therapeutic advantages over traditional monoclonal antibodies and other smaller bispecific molecules. Generally, the effectiveness of recombinant protein pharmaceuticals depends heavily on the intrinsic pharmacokinetics of the protein itself. One such benefit here is that the DLL3 targeting trispecific proteins described herein have extended pharmacokinetic elimination half-time due to having a half-life extension domain such as a domain that specifically binds to a serum albumin protein (e.g., a human serum albumin protein, HSA). In this respect, the DLL3 targeting trispecific proteins described herein have an extended serum elimination half-time of about two, three, about five, about seven, about 10, about 12, or about 14 days in some embodiments. This contrasts to other binding proteins such as BiTE or DART molecules which have relatively much shorter elimination half-times. For example, the BiTE CD19×CD3 bispecific scFv-scFv fusion molecule requires continuous intravenous infusion (i.v.) drug delivery due to its short elimination half-time. The longer intrinsic half-times of the DLL3 targeting trispecific proteins solve this issue thereby allowing for increased therapeutic potential such as low-dose pharmaceutical formulations, decreased periodic administration and/or novel pharmaceutical compositions.

[0108] The DLL3 targeting trispecific proteins described herein also have an optimal size for enhanced tissue penetration and tissue distribution. Larger sizes limit or prevent penetration or distribution of the protein in the target tissues. The DLL3 targeting trispecific proteins described herein avoid this by having a small size that allows enhanced tissue penetration and distribution. Accordingly, the DLL3 targeting trispecific proteins described herein, in some embodiments have a size of about 50 kDa to about 80 kDa, about 50 kDa to about 75 kDa, about 50 kDa to about 70 kDa, or about 50 kDa to about 65 kDa. In some embodiments, the size of the DLL3 targeting trispecific protein is smaller than about 60 kDa. Thus, the size of the DLL3 targeting trispecific proteins is advantageous over IgG antibodies which are about 150 kDa and the BiTE and DART diabody molecules which are about 55 kDa but are not half-life extended and therefore cleared quickly through the kidney.

[0109] In further embodiments, the DLL3 targeting trispecific proteins described herein have an optimal size for enhanced tissue penetration and distribution. In these embodiments, the DLL3 targeting trispecific proteins are constructed to be as small as possible, while retaining specificity toward its targets. Accordingly, in these embodiments, the DLL3 targeting trispecific proteins described herein have a size of about 20 kDa to about 40 kDa or about 25 kDa to about 35 kDa to about 40 kDa, to about 45 kDa, to about 50 kDa, to about 55 kDa, to about 60 kDa, to about 65 kDa. In some embodiments, the DLL3 targeting trispecific proteins described herein have a size of about 50 kDa, 49, kDa, 48 kDa, 47 kDa, 46 kDa, 45 kDa, 44 kDa, 43 kDa, 42 kDa, 41 kDa, 40 kDa, about 39 kDa, about 38 kDa, about 37 kDa, about 36 kDa, about 35 kDa, about 34 kDa, about 33 kDa, about 32 kDa, about 31 kDa, about 30 kDa, about 29 kDa, about 28 kDa, about 27 kDa, about 26 kDa, about 25 kDa, about 24 kDa, about 23 kDa, about 22 kDa, about 21 kDa, or about 20 kDa. An exemplary approach to the small size is through the use of single domain antibody (sdAb) fragments for each of the domains. For example, a particular DLL3 trispecific antigen-binding protein has an anti-CD3 sdAb, anti-ALB sdAb and an sdAb for DLL3. This reduces the size of the exemplary DLL3 trispecific antigen-binding protein to under 60 kDa. Thus, in some embodiments, the domains of the DLL3 targeting trispecific proteins are all single domain antibody (sdAb) fragments. It is contemplated that in some embodiments the DLL3 binding protein is fairly small and no more than 25 kDa, no more than 20 kDa, no more than 15 kDa, or no more than 10 kDa in some embodiments. In certain instances, the DLL3 binding protein is 5 kDa or less if it is a peptide or small molecule entity.

[0110] In other embodiments, the DLL3 targeting trispecific proteins described herein comprise small molecule entity (SME) binders for ALB, DLL3, CD3, or all. SME binders are small molecules averaging about 500 to 2000 Da in size and are attached to the DLL3 targeting trispecific proteins by known methods, such as sortase ligation or conjugation. In these instances, one of the domains of DLL3 trispecific antigen-binding protein is a sortase recognition sequence, LPETG (SEQ ID No: 1896). To attach a SME binder to DLL3 trispecific antigen-binding protein with a sortase recognition sequence, the protein is incubated with a sortase and a SME binder whereby the sortase attaches the SME binder to the recognition sequence. In yet other embodiments, the domain which binds to DLL3 of DLL3 targeting trispecific proteins described herein comprise a knottin peptide for binding DLL3. Knottins are disulfide-stabilized peptides with a cysteine knot scaffold and have average sizes about 3.5 kDa. Knottins have been contemplated for binding to certain tumor molecules such as DLL3. In further embodiments, the third domain which binds to DLL3 of DLL3 targeting trispecific proteins described herein comprise a natural DLL3 ligand.

[0111] Another feature of the DLL3 targeting trispecific proteins described herein is that they are of a single-polypeptide design with flexible linkage of their domains. This allows for facile production and manufacturing of the DLL3 targeting trispecific proteins as they can be encoded by single cDNA molecule to be easily incorporated into a vector. Further, because the DLL3 targeting trispecific proteins described herein are a monomeric single polypeptide chain, there are no chain pairing issues or a requirement for dimerization. It is contemplated that the DLL3 targeting trispecific proteins described herein have a reduced tendency to aggregate unlike other reported molecules such as bispecific proteins with Fc-gamma immunoglobulin domains.

[0112] In the DLL3 targeting trispecific proteins described herein, the domains are, in some embodiments, linked by internal linkers L1 and L2, where L1 links the first and second domain of the DLL3 targeting trispecific proteins and L2 links the second and third domains of the DLL3 targeting trispecific proteins. Linkers L1 and L2 have an optimized length and/or amino acid composition. In some embodiments, linkers L1 and L2 are the same length and amino acid composition. In other embodiments, L1 and L2 are different. In certain embodiments, internal linkers L1 and/or L2 are “short,” i.e., consist of 0, 1, 2, 3, 4, 5, 6, 7, 8, 9, 10, 11 or 12 amino acid residues. Thus, in certain instances, the internal linkers consist of about 12 or less amino acid residues. In the case of 0 amino acid residues, the internal linker is a peptide bond. In certain embodiments, internal linkers L1 and/or L2 are “long,” i.e., consist of 15, 20 or 25 amino acid residues. In some embodiments, these internal linkers consist of about 3 to about 15, for example 8, 9 or 10 contiguous amino acid residues. Regarding the amino acid composition of the internal linkers L1 and L2, peptides are selected with properties that confer flexibility to the DLL3 targeting trispecific proteins, do not interfere with the binding domains as well as resist cleavage from proteases. For example, glycine and serine residues generally provide protease resistance. Examples of internal linkers suitable for linking the domains in the DLL3 targeting trispecific proteins include but are not limited to (GS)ₙ (SEQ ID NO: 1809), (GGS)ₙ (SEQ ID NO: 1810), (GGGS)ₙ (SEQ ID NO: 1811), (GGSG)ₙ (SEQ ID NO: 1812), (GGSGG)ₙ (SEQ ID NO: 1813), (GGGGS)ₙ (SEQ ID NO: 1814), (GGGGG)ₙ (SEQ ID NO: 1815), or (GGG)ₙ (SEQ ID NO: 1816), wherein n is 1, 2, 3, 4, 5, 6, 7, 8, 9, or 10. In one embodiment, internal linker L1 and/or L2 is (GGGGS)₄ (SEQ ID NO: 1817) or (GGGGS)₃ (SEQ ID NO: 1818). In another embodiment, internal linker L1 and/or L2 is GGGGSGGGS (SEQ ID NO: 1808).

[0113] In some cases, the domains within the DLL3 targeting trispecific protein are conjugated using an enzymatic site-specific conjugation method which involves the use of a mammalian or bacterial transglutaminase enzyme. Microbial transglutaminases (mTGs) are versatile tools in modern research and biotechnology. The availability of large quantities of relatively pure enzymes, ease of use, and lack of regulation by calcium and guanosine-5′-triphosphate (GTP) has propelled mTG to be the main cross-linking enzyme used in both the food industry and biotechnology. Currently, mTGs are used in many applications to attach proteins and peptides to small molecules, polymers, surfaces, DNA, as well as to other proteins. See, Pavel Strp, Veracity of microbial transglutaminase, Bioconjugate Chem. 25, 5, 855-862).

[0114] In some examples are provided DLL3 targeting trispecific protein wherein one of the domains comprises an acceptor glutamine in a constant region, which can then be conjugated to another domain via a lysine-based linker (e.g., any primary amine chain which is a substrate for TGase, comprising an alkylamine, oxoamine) wherein the conjugation occurs exclusively on one or more acceptor glutamine residues present in the targeting moiety outside of the antigen combining site (e.g., outside a variable region, in a constant region). Conjugation thus does not occur on a glutamine, an at least partly surface exposed glutamine, within the variable region. The trispecific protein, in some examples, is formed by reacting one of the domains with a lysine-based linker in the presence of a TGase.

[0115] In some embodiments, where one or more domains within the DLL3 targeting trispecific binding protein are directly joined, a hybrid vector is made where the DNA encoding the directly joined domains are themselves directly ligated to each other. In some embodiments, where linkers are used, a hybrid vector is made where the DNA encoding a first domain out of the three domains is ligated to the DNA encoding one end of a first linker moiety and the DNA encoding a second domain out of the three domains is ligated to the other end of the first linker moiety; further, the DNA encoding the second domain out of the three domains is linked to one end of a second linker moiety and the DNA encoding a third domain out of the three domains is linked to the other end of the second linker moiety, wherein the first domain, the second domain, and the third domain are distinct and wherein the first domain, the second domain, and the third domain are independently selected from domain A, domain B, and domain C. Such ligation is performed, for example, either in series, or as a three-way ligation.

### CD3 Binding Domain

[0116] The specificity of the response of T cells is mediated by the recognition of antigen (displayed in context of a major histocompatibility complex, MHC) by the TCR. As part of the TCR, CD3 is a protein complex that includes a CD3γ (gamma) chain, a CD3δ (delta) chain, and two CD3ε (epsilon) chains which are present on the cell surface. CD3 associates with the α (alpha) and R (beta) chains of the TCR as well as CD3ζ (zeta) altogether to comprise the complete TCR. Clustering of CD3 on T cells, such as by immobilized anti-CD3 antibodies leads to T cell activation similar to the engagement of the T cell receptor but independent of its clone-typical specificity.

[0117] In one aspect, the DLL3 targeting trispecific proteins described herein comprise a domain which specifically binds to CD3. In one aspect, the DLL3 targeting trispecific proteins described herein comprise a domain which specifically binds to human CD3. In some embodiments, the DLL3 targeting trispecific proteins described herein comprise a domain which specifically binds to CD3γ. In some embodiments, the DLL3 targeting trispecific proteins described herein comprise a domain which specifically binds to CD36. In some embodiments, the DLL3 targeting trispecific proteins described herein comprise a domain which specifically binds to CD38.

[0118] In further embodiments, the DLL3 targeting trispecific proteins described herein comprise a domain which specifically binds to the TCR. In certain instances, the DLL3 targeting trispecific proteins described herein comprise a domain which specifically binds the a chain of the TCR. In certain instances, the DLL3 targeting trispecific proteins described herein comprise a domain which specifically binds the β chain of the TCR.

[0119] In certain embodiments, the CD3 binding domain of the DLL3 targeting trispecific proteins described herein exhibit not only potent CD3 binding affinities with human CD3 but show also excellent cross reactivity with the respective cynomolgus monkey CD3 proteins.

[0120] In some embodiments, the CD3 binding domain of the DLL3 trispecific antigen-binding protein can be any domain that binds to CD3 including but not limited to domains from a monoclonal antibody, a polyclonal antibody, a recombinant antibody, a human antibody, a humanized antibody. In some instances, it is beneficial for the CD3 binding domain to be derived from the same species in which the DLL3 trispecific antigen-binding protein will ultimately be used in. For example, for use in humans, it may be beneficial for the CD3 binding domain of the DLL3 trispecific antigen-binding protein to comprise human or humanized residues from the antigen binding domain of an antibody or antibody fragment.

[0121] Thus, in one aspect, the antigen-binding domain comprises a humanized or human antibody or an antibody fragment, or a murine antibody or antibody fragment. In one embodiment, the humanized or human anti-CD3 binding domain comprises one or more (e.g., all three) light chain complementary determining region 1 (LC CDR1), light chain complementary determining region 2 (LC CDR2), and light chain complementary determining region 3 (LC CDR3) of a humanized or human anti-CD3 binding domain described herein, and/or one or more (e.g., all three) heavy chain complementary determining region 1 (HC CDR1), heavy chain complementary determining region 2 (HC CDR2), and heavy chain complementary determining region 3 (HC CDR3) of a humanized or human anti-CD3 binding domain described herein, a humanized or human anti-CD3 binding domain comprising one or more, all three, LC CDRs and one or more, all three, HC CDRs.

[0122] In some embodiments, the humanized or human anti-CD3 binding domain comprises a humanized or human light chain variable region specific to CD3 where the light chain variable region specific to CD3 comprises human or non-human light chain CDRs in a human light chain framework region. In certain instances, the light chain framework region is a λ (lambda) light chain framework. In other instances, the light chain framework region is a κ (kappa) light chain framework.

[0123] In some embodiments, the humanized or human anti-CD3 binding domain comprises a humanized or human heavy chain variable region specific to CD3 where the heavy chain variable region specific to CD3 comprises human or non-human heavy chain CDRs in a human heavy chain framework region.

[0124] In certain instances, the complementary determining regions of the heavy chain and/or the light chain are derived from known anti-CD3 antibodies, such as, for example, muromonab-CD3 (OKT3), otelixizumab (TRX4), teplizumab (MGA031), visilizumab (NUVION®), SP34, TR-66 or X35-3, VIT3, BMA030 (BW264/56), CLB-T3/3, CRIS7, YTH12.5, F111-409, CLB-T3.4.2, TR-66, WT32, SPv-T3b, 11D8, XIII-141, XIII-46, XIII-87, 12F6, T3/RW2-8C8, T3/RW2-4B6, OKT3D, M-T301, SMC2, F101.01, UCHT-1 and WT-31.

[0125] In one embodiment, the anti-CD3 binding domain is a single chain variable fragment (scFv) comprising a light chain and a heavy chain of an amino acid sequence provided herein. As used herein, “single chain variable fragment” or “scFv” refers to an antibody fragment comprising a variable region of a light chain and at least one antibody fragment comprising a variable region of a heavy chain, wherein the light and heavy chain variable regions are contiguously linked via a short flexible polypeptide linker, and capable of being expressed as a single polypeptide chain, and wherein the scFv retains the specificity of the intact antibody from which it is derived. In an embodiment, the anti-CD3 binding domain comprises: a light chain variable region comprising an amino acid sequence having at least one, two or three modifications (e.g., substitutions) but not more than 30, 20 or 10 modifications (e.g., substitutions) of an amino acid sequence of a light chain variable region provided herein, or a sequence with 95-99% identity with an amino acid sequence provided herein; and/or a heavy chain variable region comprising an amino acid sequence having at least one, two or three modifications (e.g., substitutions) but not more than 30, 20 or 10 modifications (e.g., substitutions) of an amino acid sequence of a heavy chain variable region provided herein, or a sequence with 95-99% identity to an amino acid sequence provided herein. In some examples, the anti-CD3 binding domain comprises a sequence selected from SEQ ID NOS: 1793-1807, or a sequence that is at least about 60%, about 70%, about 75%, about 80%, about 85%, about 90%, about 91%, about 92%, about 93%, about 94%, about 95%, about 96%, about 97%, about 98%, about 99%, or about 100% identity to a sequence selected from SEQ ID NOS: 1793-1807. In some examples, the anti-CD3 binding domain comprises three heavy chain CDRs (HC CDR1, HC CDR2, and HC CDR3), and three light chain CDRs. The heavy chain CDR1(HC CDR1) of the CD3 binding domain comprises a sequence selected from SEQ ID NOS: 1820-1831, or a sequence comprising one or more modifications or substitutions in a sequence selected from SEQ ID NOS: 1820-1831, or at least about 80% to about 99%. The heavy chain CDR2 (HC CDR2) of the CD3 binding domain comprises a sequence selected from SEQ ID NOS: 1832-1841, or a sequence comprising one or more modifications or substitutions in a sequence selected from SEQ ID NOS: 1832-1841. The heavy chain CDR3 (HC CDR3) of the CD3 binding domain comprises a sequence selected from SEQ ID NOS: 1842-1853, or a sequence comprising one or more modifications or substitutions in a sequence selected from SEQ ID NOS: 1842-1853. The light chain CDR1 (LC CDR1) of the CD3 binding domain comprises a sequence selected from SEQ ID NOS: 1852-1864, or a sequence comprising one or more modifications or substitutions in a sequence selected from SEQ ID NOS: 1852-1864. The light chain CDR2 (LC CDR2) of the CD3 binding domain comprises a sequence selected from SEQ ID NOS: 1865-1877, or a sequence comprising one or more modifications or substitutions in a sequence selected from SEQ ID NOS: 1865-1877. The light chain CDR3 (LC CDR3) of the CD3 binding domain comprises a sequence selected from SEQ ID NOS: 1878-1884, or a sequence comprising one or more modifications or substitutions in a sequence selected from SEQ ID NOS: 1878-1884. In one embodiment, the humanized or human anti-CD3 binding domain is a scFv, and a light chain variable region comprising an amino acid sequence described herein, is attached to a heavy chain variable region comprising an amino acid sequence described herein, via a scFv linker. The light chain variable region and heavy chain variable region of a scFv can be in any of the following orientations: light chain variable region—scFv linker-heavy chain variable region or heavy chain variable region—scFv linker-light chain variable region.

[0126] In some instances, scFvs which bind to CD3 are prepared according to known methods. For example, scFv molecules can be produced by linking VH and VL regions together using flexible polypeptide linkers. The scFv molecules comprise a scFv linker (e.g., a Ser-Gly linker) with an optimized length and/or amino acid composition. Accordingly, in some embodiments, the length of the scFv linker is such that the VH or VL domain can associate intermolecularly with the other variable domain to form the CD3 binding site. In certain embodiments, such scFv linkers are “short”, i.e. consist of 0, 1, 2, 3, 4, 5, 6, 7, 8, 9, 10, 11 or 12 amino acid residues. Thus, in certain instances, the scFv linkers consist of about 12 or less amino acid residues. In the case of 0 amino acid residues, the scFv linker is a peptide bond. In some embodiments, these scFv linkers consist of about 3 to about 15, for example 8, 9 or 10 contiguous amino acid residues. Regarding the amino acid composition of the scFv linkers, peptides are selected that confer flexibility, do not interfere with the variable domains as well as allow inter-chain folding to bring the two variable domains together to form a functional CD3 binding site. For example, scFv linkers comprising glycine and serine residues generally provide protease resistance. In some embodiments, linkers in a scFv comprise glycine and serine residues. The amino acid sequence of the scFv linkers can be optimized, for example, by phage-display methods to improve the CD3 binding and production yield of the scFv. Examples of peptide scFv linkers suitable for linking a variable light domain and a variable heavy domain in a scFv include but are not limited to (GS)ₙ (SEQ ID NO: 1809), (GGS)ₙ (SEQ ID NO: 1810), (GGGS)ₙ (SEQ ID NO: 1811), (GGSG)ₙ (SEQ ID NO: 1812), (GGSGG)ₙ (SEQ ID NO: 1813), (GGGGS)ₙ (SEQ ID NO: 1814), (GGGGG)ₙ (SEQ ID NO: 1815), or (GGG)ₙ (SEQ ID NO: 1816), wherein n is 1, 2, 3, 4, 5, 6, 7, 8, 9, or 10. In one embodiment, the scFv linker can be (GGGGS)₄ (SEQ ID NO: 1817) or (GGGGS)₃ (SEQ ID NO: 1818). In some embodiments, a linker comprises a sequence composed of any combinations of the linkers as set forth in SEQ ID NOS: 1809 to 1818, and the length of such a linker is in some examples up to 15 amino acids, or longer than 15 amino acids. Variation in the linker length may retain or enhance activity, giving rise to superior efficacy in activity studies.

[0127] In some embodiments, CD3 binding domain of DLL3 targeting trispecific antigen-binding protein has an affinity to CD3 on CD3 expressing cells with a K_{D} of 1000 nM or less, 500 nM or less, 200 nM or less, 100 nM or less, 80 nM or less, 50 nM or less, 20 nM or less, 10 nM or less, 5 nM or less, 1 nM or less, or 0.5 nM or less. In some embodiments, the CD3 binding domain of DLL3 targeting trispecific antigen-binding protein has an affinity to CD3ε, γ, or δ with a K_{D} of 1000 nM or less, 500 nM or less, 200 nM or less, 100 nM or less, 80 nM or less, 50 nM or less, 20 nM or less, 10 nM or less, 5 nM or less, 1 nM or less, or 0.5 nM or less. In further embodiments, CD3 binding domain of DLL3 targeting trispecific antigen-binding protein has low affinity to CD3, i.e., about 100 nM or greater.

[0128] The affinity to bind to CD3 can be determined, for example, by the ability of the DLL3 targeting trispecific antigen-binding protein itself or its CD3 binding domain to bind to CD3 coated on an assay plate; displayed on a microbial cell surface; in solution; etc. The binding activity of the DLL3 targeting trispecific antigen-binding protein itself or its CD3 binding domain of the present disclosure to CD3 can be assayed by immobilizing the ligand (e.g., CD3) or the DLL3 targeting trispecific antigen-binding protein itself or its CD3 binding domain, to a bead, substrate, cell, etc. Agents can be added in an appropriate buffer and the binding partners incubated for a period of time at a given temperature. After washes to remove unbound material, the bound protein can be released with, for example, SDS, buffers with a high pH, and the like and analyzed, for example, by Surface Plasmon Resonance (SPR).

### Half-Life Extension Domain

[0129] Contemplated herein are domains which extend the half-life of an antigen-binding domain. Such domains are contemplated to include but are not limited to Albumin binding domains, Fc domains, small molecules, and other half-life extension domains known in the art.

[0130] Human albumin (ALB) (molecular mass 67 kDa) is the most abundant protein in plasma, present at about 50 mg/ml (600 μM), and has a half-life of around 20 days in humans. ALB serves to maintain plasma pH, contributes to colloidal blood pressure, functions as carrier of many metabolites and fatty acids, and serves as a major drug transport protein in plasma.

[0131] Noncovalent association with albumin extends the elimination half-time of short-lived proteins. For example, a recombinant fusion of an albumin binding domain to a Fab fragment resulted in an in vivo clearance of 25- and 58-fold and a half-life extension of 26- and 37-fold when administered intravenously to mice and rabbits respectively as compared to the administration of the Fab fragment alone. In another example, when insulin is acylated with fatty acids to promote association with albumin, a protracted effect was observed when injected subcutaneously in rabbits or pigs. Together, these studies demonstrate a linkage between albumin binding and prolonged action.

[0132] In one aspect, the DLL3 targeting trispecific proteins described herein comprise a half-life extension domain, for example a domain which specifically binds to ALB. In some embodiments, the ALB binding domain of the DLL3 targeting trispecific antigen-binding protein can be any domain that binds to ALB including but not limited to domains from a monoclonal antibody, a polyclonal antibody, a recombinant antibody, a human antibody, a humanized antibody. In some embodiments, the ALB binding domain is a single chain variable fragments (scFv), single-domain antibody such as a heavy chain variable domain (VH), a light chain variable domain (VL) and a variable domain (VHH) of camelid derived single domain antibody, peptide, ligand or small molecule entity specific for HSA. In certain embodiments, the ALB binding domain is a single-domain antibody. In other embodiments, the HSA binding domain is a peptide. In further embodiments, the HSA binding domain is a small molecule. It is contemplated that the HSA binding domain of DLL3 trispecific antigen-binding protein is fairly small and no more than 25 kD, no more than 20 kDa, no more than 15 kDa, or no more than 10 kDa in some embodiments. In certain instances, the ALB binding is 5 kDa or less if it is a peptide or small molecule entity.

[0133] The half-life extension domain of DLL3 targeting trispecific antigen-binding protein provides for altered pharmacodynamics and pharmacokinetics of the DLL3 targeting trispecific antigen-binding protein itself. As above, the half-life extension domain extends the elimination half-time. The half-life extension domain also alters pharmacodynamic properties including alteration of tissue distribution, penetration, and diffusion of the trispecific antigen-binding protein. In some embodiments, the half-life extension domain provides for improved tissue (including tumor) targeting, tissue distribution, tissue penetration, diffusion within the tissue, and enhanced efficacy as compared with a protein without a half-life extension domain. In one embodiment, therapeutic methods effectively and efficiently utilize a reduced amount of the trispecific antigen-binding protein, resulting in reduced side effects, such as reduced non-tumor cell cytotoxicity.

[0134] Further, the binding affinity of the half-life extension domain can be selected so as to target a specific elimination half-time in a particular trispecific antigen-binding protein. Thus, in some embodiments, the half-life extension domain has a high binding affinity. In other embodiments, the half-life extension domain has a medium binding affinity. In yet other embodiments, the half-life extension domain has a low or marginal binding affinity. Exemplary binding affinities include KD concentrations at 10 nM or less (high), between 10 nM and 100 nM (medium), and greater than 100 nM (low). As above, binding affinities to ALB are determined by known methods such as Surface Plasmon Resonance (SPR). In some embodiments, ALB binding domains described herein comprise a single domain antibody.

[0135] In some embodiments, the half-life extension domain comprises a sequence selected from SEQ ID NOS: 1769-1778, or a sequence that is at least about 70%, about 75%, about 80%, about 85%, about 90%, about 95%, about 96%, about 97%, about 98%, about 99%, or 100% identical to a sequence selected from SEQ ID NOS: 1769-1778. In some examples, the half-life extension comprises three heavy chain CDRs (HC CDR1, HC CDR2, and HC CDR3), and three light chain CDRs. In some examples, the half-life extension comprises three heavy chain CDRs (HC CDR1, HC CDR2, and HC CDR3), or three light chain CDRs. The heavy chain CDR1(HC CDR1) of the half-life extension domain, in some embodiments, comprises a sequence selected from SEQ ID NOS: 1782-1784, or a sequence comprising one or more modifications or substitutions in a sequence selected from SEQ ID NOS: 1782-1784, or at least about 80% to about 99%. The heavy chain CDR2 (HC CDR2) of the half-life extension domain, in some embodiments, comprises a sequence selected from SEQ ID NOS: 1785-1790, or a sequence comprising one or more modifications or substitutions in a sequence selected from SEQ ID NOS: 1785-1790. The heavy chain CDR3 (HC CDR3) of the CD3 binding domain comprises a sequence selected from SEQ ID NOS: 1791 or 1792, or a sequence comprising one or more modifications or substitutions in a sequence selected from SEQ ID NOS: 1791 or 1792. DLL3 binding domain

[0136] DLL3 (also known as Delta-like Ligand 3 or SCDO1) is a member of the Delta-like family of Notch DSL ligands. Representative DLL3 protein orthologs include, but are not limited to, human (Accession NOS: NP_058637 and NP_982353), chimpanzee (Accession NO: XP_003316395), mouse (Accession NO: NP_031892), and rat (Accession NO: NP_446118). In humans, the DLL3 gene consists of 8 exons spanning 9.5 kbp located on chromosome 19q13. Alternate splicing within the last exon gives rise to two processed transcripts, one of 2389 bases (Accession NO: NM_016941) and one of 2052 bases (Accession NO: NM_203486). The former transcript encodes a 618 amino acid protein (Accession NO: NP_058637), whereas the latter encodes a 587 amino acid protein (Accession NO: NP_982353). These two protein isoforms of DLL3 share overall 100% identity across their extracellular domains and their transmembrane domains, differing only in that the longer isoform contains an extended cytoplasmic tail containing 32 additional residues at the carboxy terminus of the protein. The extracellular region of the DLL3 protein, comprises six EGF-like domains, the single DSL domain and the N-terminal domain. Generally, the EGF domains are recognized as occurring at about amino acid residues 216-249 (domain 1), 274-310 (domain 2), 312-351 (domain 3), 353-389 (domain 4), 391-427 (domain 5) and 429-465 (domain 6), with the DSL domain at about amino acid residues 176-215 and the N-terminal domain at about amino acid residues 27-175 of hDLL3. Each of the EGF-like domains, the DSL domain and the N-terminal domain comprise part of the DLL3 protein as defined by a distinct amino acid sequence. The EGF-like domains are termed, in some embodiments, as EGF1 to EGF6 with EGF1 being closest to the N-terminal portion of the protein. In general, DSL ligands are composed of a series of structural domains: a unique N-terminal domain, followed by a conserved DSL domain, multiple tandem epidermal growth factor (EGF)-like repeats, a transmembrane domain, and a cytoplasmic domain not highly conserved across ligands but one which contains multiple lysine residues that are potential sites for ubiquitination by unique E3 ubiquitin ligases. The DSL domain is a degenerate EGF-domain that is necessary but not sufficient for interactions with Notch receptors. Additionally, the first two EGF-like repeats of most DSL ligands contain a smaller protein sequence motif known as a DOS domain that co-operatively interacts with the DSL domain when activating Notch signaling.

[0137] In some embodiments, the disclosed DLL3 trispecific binding proteins of this disclosure are generated, fabricated, engineered or selected so as to react with a selected domain, motif or epitope within a DLL3 protein. In some embodiments, the DLL3 targeting trispecific protein binds to the DSL domain and, in some embodiments, binds to an epitope comprising G203, R205, P206 within the DSL domain.

[0138] The DLL3 binding domain of the DLL3 targeting trispecific proteins of the present disclosure are, in some embodiments, engineered fabricated and/or selected to react with both isoform(s) of DLL3 or a single isoform of the protein or, conversely, comprise a pan-DLL binding domain that reacts or associates with at least one additional DLL family member in addition to DLL3. In some embodiments, the DLL3 binding domain, such as DLL3 binding domain are engineered, fabricated, and/or selected so that they react with domains (or epitopes therein) that are exhibited by DLL3 only or with domains that are at least somewhat conserved across multiple or all DLL family members.

[0139] In some embodiments the DLL3 binding domain associates or binds to a specific epitope, portion, motif or domain of DLL3. Both DLL3 isoforms incorporate an identical extracellular region comprising at least an N-terminal domain, a DSL (Delta/Serrate/lag-2) domain and six EGF-like domains (i.e., EGF1-EGF6). Accordingly, in certain embodiments the DLL3 binding domain binds or associate with the N-terminal domain of DLL3 (amino acids 27-175 in the mature protein) while in other embodiments the DLL3 binding domain associates with the DSL domain (amino acids 176-215) or epitope therein. In other aspects of the present disclosure the DLL3 binding domain associates or bind to a specific epitope located in a particular EGF-like domain of DLL3. In some embodiments, the DLL3 binding domain associates or binds to an epitope located in EGF1 (amino acids 216-249), EGF2 (amino acids 274-310), EGF3 (amino acids 312-351), EGF4 (amino acids 353-389), EGF5 (amino acids 391.427) or EGF6 (amino acids 429-465). In some embodiments, each of the aforementioned domains comprises more than one epitope and/or more than one bin. In some embodiments the DLL3 binding domain binds, reacts or associates with the DSL domain or an epitope therein. In other embodiments the DLL3 binding domain binds, reacts or associates with a particular EGF-like domain or an epitope therein. In some embodiments the DLL3 binding domain binds, reacts or associates with the N-terminal domain or an epitope therein.

[0140] In some embodiments, the DLL3 binding proteins of this disclosure, such as the DLL3 binding domain of the trispecific proteins of this disclosure binds to the full length DLL3 protein or to a fragment thereof, such as epitope containing fragments within the full length DLL3 protein, as described above. In some cases, the epitope containing fragment comprises antigenic or immunogenic fragments and derivatives thereof of the DLL3 protein. Epitope containing fragments, including antigenic or immunogenic fragments, are, in some embodiments, 12 amino acids or more, 20 amino acids or more, 50 or 100 amino acids or more. The DLL3 fragments, in some embodiments, comprises 95% or more of the length of the full protein, 90% or more, 75% or 50% or 25% or 10% or more of the length of the full protein. In some embodiments, the epitope-containing fragments of DLL3 including antigenic or immunogenic fragments are capable of eliciting a relevant immune response in a patient. Derivatives of DLL3 include, in some embodiments, variants on the sequence in which one or more (e.g., 1-20 such as 15 amino acids, or up to 20% such as up to 10% or 5% or 1% by number of amino acids based on the total length of the protein) deletions, insertions or substitutions have been made to the DLL3 sequence provided in SEQ ID NO: 1885 (UniProtKB Accession Q9NYJ7). In some embodiments, substitutions comprise conservative substitutions. Derivatives and variants of DLL3, in some examples, have essentially the same biological function as the DLL3 protein from which they are derived. For instance, derivatives and variants of DLL3 are, in some cases, comparably antigenic or immunogenic to the protein from which they are derived, have either the ligand-binding activity, or the active receptor-complex forming ability, or preferably both, of the protein from which they are derived, and have the same tissue distribution as DLL3.

[0141] The design of the DLL3 targeting trispecific proteins described herein allows the binding domain to DLL3 to be flexible in that the binding domain to DLL3 can be any type of binding domain, including but not limited to, domains from a monoclonal antibody, a polyclonal antibody, a recombinant antibody, a human antibody, a humanized antibody. In some embodiments, the binding domain to DLL3 is a single chain variable fragments (scFv), a single-domain antibody such as a heavy chain variable domain (VH), a light chain variable domain (VL) and a variable domain (VHH) of camelid derived single domain antibody. In other embodiments, the binding domain to DLL3 is a non-Ig binding domain, i.e., an antibody mimetic, such as anticalins, affilins, affibody molecules, AFFIMERS®, affitins, alphabodies, avimers, DARPINS®, fynomers, kunitz domain peptides, and monobodies. In further embodiments, the binding domain to DLL3 is a ligand or peptide that binds to or associates with DLL3. In yet further embodiments, the binding domain to DLL3 is a knottin. In yet further embodiments, the binding domain to DLL3 is a small molecular entity.

[0142] In some embodiments, the DLL3 binding domain binds to a protein comprising the sequence of SEQ ID NO: 1885 (UniProtKB Accession Q9NYJ7). In some embodiments, the DLL3 binding domain binds to a protein comprising a truncated sequence compared to SEQ ID NO: 1885 (UniProtKB Accession Q9NYJ7). In some embodiments, the DLL3 binding domain binds to a protein comprising the sequence of SEQ ID NO: 1892 or SEQ ID NO: 1893 (which is the mature extracellular domain of a DLL3 protein). In some embodiments, the DLL3 binding domain binds to a protein comprising amino acids 47-492 of SEQ ID NO: 1892. In some embodiments, the DLL3 binding domain recognizes an epitope within amino acids 47-4492 of SEQ ID NO: 1892.

[0143] In some embodiments, the DLL3 binding domain is an anti-DLL3 antibody or an antibody variant. As used herein, the term “antibody variant” refers to variants and derivatives of an antibody described herein. In certain embodiments, amino acid sequence variants of the anti-DLL3 antibodies described herein are contemplated. For example, in certain embodiments amino acid sequence variants of anti-DLL3 antibodies described herein are contemplated to improve the binding affinity and/or other biological properties of the antibodies. Exemplary method for preparing amino acid variants include, but are not limited to, introducing appropriate modifications into the nucleotide sequence encoding the antibody, or by peptide synthesis. Such modifications include, for example, deletions from, and/or insertions into and/or substitutions of residues within the amino acid sequences of the antibody.

[0144] Any combination of deletion, insertion, and substitution can be made to arrive at the final construct, provided that the final construct possesses the desired characteristics, antigen-binding. In certain embodiments, antibody variants having one or more amino acid substitutions are provided. Sites of interest for substitution mutagenesis include the CDRs and framework regions. Examples of such substitutions are described below. Amino acid substitutions may be introduced into an antibody of interest and the products screened for a desired activity, retained/improved antigen binding, decreased immunogenicity, or improved T-cell mediated cytotoxicity (TDCC). Both conservative and non-conservative amino acid substitutions are contemplated for preparing the antibody variants.

[0145] In another example of a substitution to create a variant anti-DLL3 antibody, one or more hypervariable region residues of a parent antibody are substituted. In general, variants are then selected based on improvements in desired properties compared to a parent antibody, for example, increased affinity, reduced affinity, reduced immunogenicity, increased pH dependence of binding.

[0146] In some embodiments, the DLL3 binding domain of the DLL3 targeting trispecific protein is a single domain antibody such as a heavy chain variable domain (VH), a variable domain (VHH) of a llama derived sdAb, a peptide, a ligand or a small molecule entity specific for DLL3. In some embodiments, the DLL3 binding domain of the DLL3 targeting trispecific protein described herein is any domain that binds to DLL3 including but not limited to domains from a monoclonal antibody, a polyclonal antibody, a recombinant antibody, a human antibody, a humanized antibody. In certain embodiments, the DLL3 binding domain is a single-domain antibody. In other embodiments, the DLL3 binding domain is a peptide. In further embodiments, the DLL3 binding domain is a small molecule.

[0147] Generally, it should be noted that the term single domain antibody as used herein in its broadest sense is not limited to a specific biological source or to a specific method of preparation. Single domain antibodies are antibodies whose complementary determining regions are part of a single domain polypeptide. Examples include, but are not limited to, heavy chain antibodies, antibodies naturally devoid of light chains, single domain antibodies derived from conventional 4-chain antibodies, engineered antibodies and single domain scaffolds other than those derived from antibodies. Single domain antibodies may be any of the art, or any future single domain antibodies. Single domain antibodies may be derived from any species including, but not limited to mouse, human, camel, llama, goat, rabbit, bovine. For example, in some embodiments, the single domain antibodies of the disclosure are obtained: (1) by isolating the VHH domain of a naturally occurring heavy chain antibody; (2) by expression of a nucleotide sequence encoding a naturally occurring VHH domain; (3) by “humanization” of a naturally occurring VHH domain or by expression of a nucleic acid encoding a such humanized VHH domain; (4) by “camelization” of a naturally occurring VH domain from any animal species, and in particular from a species of mammal, such as from a human being, or by expression of a nucleic acid encoding such a camelized VH domain; (5) by “camelisation” of a “domain antibody” or “Dab,” or by expression of a nucleic acid encoding such a camelized VH domain; (6) by using synthetic or semi-synthetic techniques for preparing proteins, polypeptides or other amino acid sequences; (7) by preparing a nucleic acid encoding a single domain antibody using techniques for nucleic acid synthesis known in the field, followed by expression of the nucleic acid thus obtained; and/or (8) by any combination of one or more of the foregoing.

[0148] In one embodiment, a single domain antibody corresponds to the VHH domains of naturally occurring heavy chain antibodies directed against DLL3. As further described herein, such VHH sequences can generally be generated or obtained by suitably immunizing a species of Llama with DLL3, (i.e., so as to raise an immune response and/or heavy chain antibodies directed against DLL3), by obtaining a suitable biological sample from said Llama (such as a blood sample, serum sample or sample of B-cells), and by generating VHH sequences directed against DLL3, starting from said sample, using any suitable technique known in the field.

[0149] In another embodiment, such naturally occurring VHH domains against DLL3, are obtained from naïve libraries of Camelid VHH sequences, for example by screening such a library using DLL3, or at least one part, fragment, antigenic determinant or epitope thereof using one or more screening techniques known in the field. Such libraries and techniques are for example described in WO 99/37681, WO 01/90190, WO 03/025020 and WO 03/035694. Alternatively, improved synthetic or semi-synthetic libraries derived from naïve VHH libraries are used, such as VHH libraries obtained from naïve VHH libraries by techniques such as random mutagenesis and/or CDR shuffling, as for example described in WO 00/43507.

[0150] In a further embodiment, yet another technique for obtaining VHH sequences directed against DLL3, involves suitably immunizing a transgenic mammal that is capable of expressing heavy chain antibodies (i.e., so as to raise an immune response and/or heavy chain antibodies directed against DLL3), obtaining a suitable biological sample from said transgenic mammal (such as a blood sample, serum sample or sample of B-cells), and then generating VHH sequences directed against DLL3, starting from said sample, using any suitable technique known in the field. For example, for this purpose, the heavy chain antibody-expressing rats or mice and the further methods and techniques described in WO 02/085945 and in WO 04/049794 can be used.

[0151] In some embodiments, an anti-DLL3 single domain antibody of the DLL3 targeting trispecific protein comprises a single domain antibody with an amino acid sequence that corresponds to the amino acid sequence of a naturally occurring VHH domain, but that has been “humanized”, i.e., by replacing one or more amino acid residues in the amino acid sequence of said naturally occurring VHH sequence (and in particular in the framework sequences) by one or more of the amino acid residues that occur at the corresponding position(s) in a VH domain from a conventional 4-chain antibody from a human being (e.g., as indicated above). This can be performed in a manner known in the field, which will be clear to the skilled person, for example on the basis of the further description herein. Again, it should be noted that such humanized anti-DLL3 single domain antibodies of the disclosure are obtained in any suitable manner known per se (i.e., as indicated under points (1)-(8) above) and thus are not strictly limited to polypeptides that have been obtained using a polypeptide that comprises a naturally occurring VHH domain as a starting material. In some additional embodiments, a single domain anti-DLL3 antibody, as described herein, comprises a single domain antibody with an amino acid sequence that corresponds to the amino acid sequence of a naturally occurring VH domain, but that has been “camelized,” i.e., by replacing one or more amino acid residues in the amino acid sequence of a naturally occurring VH domain from a conventional 4-chain antibody by one or more of the amino acid residues that occur at the corresponding position(s) in a VHH domain of a heavy chain antibody. Such “camelizing” substitutions are preferably inserted at amino acid positions that form and/or are present at the VH-VL interface, and/or at the so-called Camelidae hallmark residues (see for example WO 94/04678 and Davies and Riechmann (1994 and 1996)). Preferably, the VH sequence that is used as a starting material or starting point for generating or designing the camelized single domain is preferably a VH sequence from a mammal, more preferably the VH sequence of a human being, such as a VH3 sequence. However, it should be noted that such camelized anti-DLL3 single domain antibodies of the disclosure, in certain embodiments, are obtained in any suitable manner known in the field (i.e., as indicated under points (1)-(8) above) and thus are not strictly limited to polypeptides that have been obtained using a polypeptide that comprises a naturally occurring VH domain as a starting material. For example, as further described herein, both “humanization” and “camelization” is performed by providing a nucleotide sequence that encodes a naturally occurring VHH domain or VH domain, respectively, and then changing, one or more codons in said nucleotide sequence in such a way that the new nucleotide sequence encodes a “humanized” or “camelized” single domain antibody, respectively. This nucleic acid can then be expressed, so as to provide a desired anti-DLL3 single domain antibody of the disclosure. Alternatively, in other embodiments, based on the amino acid sequence of a naturally occurring VHH domain or VH domain, respectively, the amino acid sequence of the desired humanized or camelized anti-DLL3 single domain antibody of the disclosure, respectively, are designed and then synthesized de novo using known techniques for peptide synthesis. In some embodiments, based on the amino acid sequence or nucleotide sequence of a naturally occurring VHH domain or VH domain, respectively, a nucleotide sequence encoding the desired humanized or camelized anti-DLL3 single domain antibody of the disclosure, respectively, is designed and then synthesized de novo using known techniques for nucleic acid synthesis, after which the nucleic acid thus obtained is expressed in using known expression techniques, so as to provide the desired anti-DLL3 single domain antibody of the disclosure.

[0152] Other suitable methods and techniques for obtaining the anti-DLL3 single domain antibody of the disclosure and/or nucleic acids encoding the same, starting from naturally occurring VH sequences or VHH sequences for example comprises combining one or more parts of one or more naturally occurring VH sequences (such as one or more framework (FR) sequences and/or complementarity determining region (CDR) sequences), one or more parts of one or more naturally occurring VHH sequences (such as one or more FR sequences or CDR sequences), and/or one or more synthetic or semi-synthetic sequences, in a suitable manner, so as to provide an anti-DLL3 single domain antibody of the disclosure or a nucleotide sequence or nucleic acid encoding the same.

[0153] In some embodiments, the DLL3 binding domain is an anti-DLL3 specific antibody comprising a heavy chain variable complementarity determining region CDR1, a heavy chain variable CDR2, a heavy chain variable CDR3, a light chain variable CDR1, a light chain variable CDR2, and a light chain variable CDR3. In some embodiments, the DLL3 binding domain comprises any domain that binds to DLL3 including but not limited to domains from a monoclonal antibody, a polyclonal antibody, a recombinant antibody, a human antibody, a humanized antibody, or antigen binding fragments such as single domain antibodies (sdAb), Fab, Fab′, F(ab)2, and Fv fragments, fragments comprised of one or more CDRs, single-chain antibodies (e.g., single chain Fv fragments (scFv)), disulfide stabilized (dsFv) Fv fragments, heteroconjugate antibodies (e.g., bispecific antibodies), pFv fragments, heavy chain monomers or dimers, light chain monomers or dimers, and dimers consisting of one heavy chain and one light chain. In some embodiments, the DLL3 binding domain is a single domain antibody. In some embodiments, the anti-DLL3 single domain antibody comprises heavy chain variable complementarity determining regions (CDR), CDR1, CDR2, and CDR3.

[0154] In some embodiments, the DLL3 binding domain is a polypeptide comprising an amino acid sequence that is comprised of four framework regions/sequences (f1-f4) interrupted by three complementarity determining regions/sequences, as represented by the formula: f1-r1-f2-r2-f3-r3-f4, wherein r1, r2, and r3 are complementarity determining regions CDR1, CDR2, and CDR3, respectively, and f1, f2, f3, and f4 are framework residues. The framework residues of the DLL3 binding protein of the present disclosure comprise, for example, 75, 76, 77, 78, 79, 80, 81, 82, 83, 84, 85, 86, 87, 88, 89, 90, 91, 92, 93, or 94 amino acid residues, and the complementarity determining regions comprise, for example, 24, 25, 26, 27, 28, 29, 30, 31, 32, 33, 34, 35, or 36 amino acid residues. In some embodiments, the DLL3 binding domain comprises an amino acid sequence selected from SEQ ID NOS: 1-442 and 1886. In some embodiments, CDR1 of the DLL3 binding domain comprises a sequence selected from SEQ ID NOS: 443-884 and 1887, or one or more amino acid substitutions relative to a sequence selected from the group consisting of SEQ ID NOS: 443-884 and 1887. In some embodiments, CDR2 comprises a sequence selected from the group consisting of SEQ ID NOS: 885-1326 and 1888, or one or more amino acid substitutions relative to a sequence selected from the group consisting of SEQ ID NOS: 885-1326 and 1888. In some embodiments, the CDR3 comprises a sequence selected from the group consisting of SEQ ID NOS: 1327-1768 and 1889, or one or more substitutions relative to a sequence selected from SEQ ID NOS: 1327-1768 and 1889.

[0155] In some embodiments, the CDR1 comprises an amino acid sequence selected from SEQ ID NOS: 443-884 and 1887 or a variant having one, two, three, four, five, six, seven, eight, nine, or ten amino acid substitutions in an amino acid selected from SEQ ID NOS: 443-884 and 1887. In some embodiments, the CDR2 comprises an amino acid sequence selected from SEQ ID NOS: 885-1326 and 1888 or a variant having one, two, three, four, five, six, seven, eight, nine, or ten amino acid substitutions in an amino acid sequence selected from SEQ ID NOS: 885-1326 and 1888. In some embodiments, the CDR3 comprises an amino acid sequence selected from SEQ ID NOS: 1327-1768 and 1889 or a variant having one, two, three, four, five, six, seven, eight, nine, or ten amino acid substitutions in a sequence selected from SEQ ID NOS: 1327-1768 and 1889.

[0156] In some embodiments, the CDR1 comprises an amino acid sequence selected from SEQ ID NOS: 495-528 or a variant having one, two, three, four, five, six, seven, eight, nine, or ten amino acid substitutions in an amino acid selected from SEQ ID NOS: 495-528. In some embodiments, the CDR2 comprises an amino acid sequence selected from SEQ ID NOS: 937-970 or a variant having one, two, three, four, five, six, seven, eight, nine, or ten amino acid substitutions in an amino acid sequence selected from SEQ ID NOS: 937-970. In some embodiments, the CDR3 comprises an amino acid sequence selected from SEQ ID NOS: 1379-1412 or a variant having one, two, three, four, five, six, seven, eight, nine, or ten amino acid substitutions in a sequence selected from SEQ ID NOS: 1379-1412.

[0157] In some embodiments, the CDR1 comprises an amino acid sequence selected from SEQ ID NOS: 529-809 or a variant having one, two, three, four, five, six, seven, eight, nine, or ten amino acid substitutions in an amino acid selected from SEQ ID NOS: 529-809. In some embodiments, the CDR2 comprises an amino acid sequence selected from SEQ ID NOS: 971 to 1251 or a variant having one, two, three, four, five, six, seven, eight, nine, or ten amino acid substitutions in an amino acid sequence selected from SEQ ID NOS: 971 to 1251. In some embodiments, the CDR3 comprises an amino acid sequence selected from SEQ ID NOS: 1379 to 1412 or a variant having one, two, three, four, five, six, seven, eight, nine, or ten amino acid substitutions in a sequence selected from SEQ ID NOS: 1379-1412.

[0158] In some embodiments, the CDR1 comprises an amino acid sequence selected from SEQ ID NOS: 810-884 or a variant having one, two, three, four, five, six, seven, eight, nine, or ten amino acid substitutions in an amino acid selected from SEQ ID NOS: 810-884. In some embodiments, the CDR2 comprises an amino acid sequence selected from SEQ ID NOS: 1252 to 1326 or a variant having one, two, three, four, five, six, seven, eight, nine, or ten amino acid substitutions in an amino acid sequence selected from SEQ ID NOS: 1252 to 1326. In some embodiments, the CDR3 comprises an amino acid sequence selected from SEQ ID NOS: 1692 to 1768 or a variant having one, two, three, four, five, six, seven, eight, nine, or ten amino acid substitutions in a sequence selected from SEQ ID NOS: 1692 to 1768.

[0159] In various embodiments, the DLL3 binding domain of the present disclosure is at least about 75%, about 76%, about 77%, about 78%, about 79%, about 80%, about 81%, about 82%, about 83%, about 84%, about 85%, about 86%, about 87%, about 88%, about 89%, about 90%, about 91%, about 92%, about 93%, about 94%, about 95%, about 96%, about 97%, about 98%, about 99%, or about 100% identical to an amino acid sequence selected from SEQ ID NOS: 1-442 and 1886. In various embodiments, the DLL3 binding domain of the present disclosure is at least about 75%, about 76%, about 77%, about 78%, about 79%, about 80%, about 81%, about 82%, about 83%, about 84%, about 85%, about 86%, about 87%, about 88%, about 89%, about 90%, about 91%, about 92%, about 93%, about 94%, about 95%, about 96%, about 97%, about 98%, about 99%, or about 100% identical to an amino acid sequence selected from SEQ ID NOS: 53-86.

[0160] In various embodiments, the DLL3 binding domain of the present disclosure is at least about 75%, about 76%, about 77%, about 78%, about 79%, about 80%, about 81%, about 82%, about 83%, about 84%, about 85%, about 86%, about 87%, about 88%, about 89%, about 90%, about 91%, about 92%, about 93%, about 94%, about 95%, about 96%, about 97%, about 98%, about 99%, or about 100% identical to an amino acid sequence selected from SEQ ID NOS: 87-367.

[0161] In various embodiments, the DLL3 binding domain of the present disclosure is at least about 75%, about 76%, about 77%, about 78%, about 79%, about 80%, about 81%, about 82%, about 83%, about 84%, about 85%, about 86%, about 87%, about 88%, about 89%, about 90%, about 91%, about 92%, about 93%, about 94%, about 95%, about 96%, about 97%, about 98%, about 99%, or about 100% identical to SEQ ID No. 68, or a sequence derived from SEQ ID No. 68.

[0162] In various embodiments, the DLL3 binding domain of the present disclosure is at least about 75%, about 76%, about 77%, about 78%, about 79%, about 80%, about 81%, about 82%, about 83%, about 84%, about 85%, about 86%, about 87%, about 88%, about 89%, about 90%, about 91%, about 92%, about 93%, about 94%, about 95%, about 96%, about 97%, about 98%, about 99%, or about 100% identical to SEQ ID No. 75, or a sequence derived from SEQ ID No. 75.

[0163] In some embodiments, the DLL3 binding domain of the DLL3 targeting trispecific binding protein is cross-reactive with human and cynomolgus DLL3. In some embodiments, the DLL3 binding domain is specific for human DLL3. In certain embodiments, the DLL3 binding domain disclosed herein binds to human DLL3 with a human Kd (hKd). In certain embodiments, the DLL3 binding domain disclosed herein binds to cynomolgus DLL3 with a cynomolgus Kd (cKd). In certain embodiments, the DLL3 binding domain disclosed herein binds to both cynomolgus DLL3 and a human DLL3, with a cyno Kd (cKd) and a human Kd, respectively (hKd). In some embodiments, the DLL3 binding protein binds to human and cynomolgus DLL3 with comparable binding affinities (i.e., hKd and cKd values do not differ by more than ±10%). In some embodiments, the hKd and the cKd range from about 0.001 nM to about 500 nM. In some embodiments, the hKd and the cKd range from about 0.001 nM to about 450 nM. In some embodiments, the hKd and the cKd range from about 0.001 nM to about 400 nM. In some embodiments, the hKd and the cKd range from about 0.001 nM to about 350 nM. In some embodiments, the hKd and the cKd range from about 0.001 nM to about 300 nM. In some embodiments, the hKd and the cKd range from about 0.001 nM to about 250 nM. In some embodiments, the hKd and the cKd range from about 0.001 nM to about 200 nM. In some embodiments, the hKd and the cKd range from about 0.001 nM to about 150 nM. In some embodiments, the hKd and the cKd range from about 0.001 nM to about 100 nM. In some embodiments, the hKd and the cKd range from about 0.1 nM to about 90 nM. In some embodiments, the hKd and the cKd range from about 0.2 nM to about 80 nM. In some embodiments, the hKd and the cKd range from about 0.3 nM to about 70 nM. In some embodiments, the hKd and the cKd range from about 0.4 nM to about 50 nM. In some embodiments, the hKd and the cKd range from about 0.5 nM to about 30 nM. In some embodiments, the hKd and the cKd range from about 0.6 nM to about 10 nM. In some embodiments, the hKd and the cKd range from about 0.7 nM to about 8 nM. In some embodiments, the hKd and the cKd range from about 0.8 nM to about 6 nM. In some embodiments, the hKd and the cKd range from about 0.9 nM to about 4 nM. In some embodiments, the hKd and the cKd range from about 1 nM to about 2 nM.

[0164] In certain embodiments, the DLL3 binding domains of the present disclosure preferentially bind membrane bound DLL3 over soluble DLL3. Membrane bound DLL3 refers to the presence of DLL3 in or on the cell membrane surface of a cell that expresses DLL3. Soluble DLL3 refers to DLL3 that is no longer on in or on the cell membrane surface of a cell that expresses or expressed DLL3. In certain instances, the soluble DLL3 is present in the blood and/or lymphatic circulation in a subject. In one embodiment, the DLL3 binding proteins bind membrane-bound DLL3 at least 5 fold, 10 fold, 15 fold, 20 fold, 25 fold, 30 fold, 40 fold, 50 fold, 100 fold, 500 fold, or 1000 fold greater than soluble DLL3. In one embodiment, the antigen binding proteins of the present disclosure preferentially bind membrane-bound DLL3 30 fold greater than soluble DLL3. Determining the preferential binding of an antigen binding protein to membrane bound DLL3 over soluble DLL3 can be readily determined using assays well known in the art.

[0165] In some embodiments, any of the foregoing DLL3 binding domains (e.g., anti-DLL3 single domain antibodies of SEQ ID NOS: 1-442 and 1886) are affinity peptide tagged for ease of purification. In some embodiments, the affinity peptide tag is six consecutive histidine residues, also referred to as 6X-his (SEQ ID NO: 1819).

[0166] In some embodiments, any of the foregoing DLL3 binding domains (e.g., anti-DLL3 single domain antibodies of SEQ ID NOS: 1-442 and 1886) are affinity peptide tagged for ease of purification. In some embodiments, the affinity peptide tag is six consecutive histidine residues, also referred to as 6X-his (SEQ ID NO: 1819).

Integration into Chimeric Antigen Receptors (CAR)

[0167] The DLL3 targeting trispecific antigen binding proteins of the present disclosure can, in certain examples, be incorporated into a chimeric antigen receptor (CAR). An engineered immune effector cell, a T cell or NK cell, can be used to express a CAR that includes an anti-DLL3 targeting trispecific protein containing an anti-DLL3 single domain antibody as described herein. In one embodiment, the CAR including an anti-DLL3 targeting trispecific protein as described herein is connected to a transmembrane domain via a hinge region, and further a costimulatory domain, a functional signaling domain obtained from OX40, CD27, CD28, CD5, ICAM-1, LFA-1 (CD11a/CD18), ICOS (CD278), or 4-1BB. In some embodiments, the CAR further comprises a sequence encoding an intracellular signaling domain, such as 4-1BB and/or CD3 zeta.

### Tumor Growth Reduction Properties

[0168] In certain embodiments, the DLL3 targeting trispecific proteins of the disclosure reduce the growth of tumor cells in vivo when administered to a subject who has tumor cells that express DLL3. Measurement of the reduction of the growth of tumor cells can be determined by multiple different methodologies well known in the art. Non-limiting examples include direct measurement of tumor dimension, measurement of excised tumor mass and comparison to control subjects, measurement via imaging techniques (e.g., CT or MRI) that may or may not use isotopes or luminescent molecules (e.g., luciferase) for enhanced analysis, and the like.

[0169] In specific embodiments, administration of the trispecific proteins of the disclosure results in a reduction of in vivo growth of tumor cells as compared to a control antigen binding agent by at least about 10%, 20%, 30%, 40%, 50%, 60%, 70%, 80%, 90% or 100%, with an about 100% reduction in tumor growth indicating a complete response and disappearance of the tumor. In further embodiments, administration of the trispecific proteins of the disclosure results in a reduction of in vivo growth of tumor cells as compared to a control antigen binding agent by about 50-100%, about 75-100% or about 90-100%. In further embodiments, administration of the trispecific proteins of the disclosure results in a reduction of in vivo growth of tumor cells as compared to a control antigen binding agent by about 50-60%, about 60-70%, about 70-80%, about 80-90%, or about 90-100%.

### DLL3 Targeting Trispecific Protein Modifications

[0170] The DLL3 targeting trispecific proteins described herein encompass derivatives or analogs in which (i) an amino acid is substituted with an amino acid residue that is not one encoded by the genetic code, (ii) the mature polypeptide is fused with another compound such as polyethylene glycol, or (iii) additional amino acids are fused to the protein, such as a leader or secretory sequence or a sequence for purification of the protein.

[0171] Typical modifications include, but are not limited to, acetylation, acylation, ADP-ribosylation, amidation, covalent attachment of flavin, covalent attachment of a heme moiety, covalent attachment of a nucleotide or nucleotide derivative, covalent attachment of a lipid or lipid derivative, covalent attachment of phosphatidylinositol, cross-linking, cyclization, disulfide bond formation, demethylation, formation of covalent crosslinks, formation of cystine, formation of pyroglutamate, formylation, gamma carboxylation, glycosylation, GPI anchor formation, hydroxylation, iodination, methylation, myristoylation, oxidation, proteolytic processing, phosphorylation, prenylation, racemization, selenoylation, sulfation, transfer-RNA mediated addition of amino acids to proteins such as arginylation, and ubiquitination.

[0172] Modifications are made anywhere in DLL3 targeting trispecific proteins described herein, including the peptide backbone, the amino acid side-chains, and the amino or carboxyl termini. Certain common peptide modifications that are useful for modification of DLL3 targeting trispecific proteins include glycosylation, lipid attachment, sulfation, gamma-carboxylation of glutamic acid residues, hydroxylation, blockage of the amino or carboxyl group in a polypeptide, or both, by a covalent modification, and ADP-ribosylation.

[0173] In some embodiments, a derivative of the DLL3 targeting trispecific protein as described herein comprises immunoreactive modulator derivatives and antigen binding molecules comprising one or more modifications.

[0174] In some embodiments, the trispecific DLL3 binding molecules of the disclosure are monovalent or multivalent, bivalent, trivalent, etc. As used herein, the term “valency” refers to the number of potential target binding sites associated with an antibody. Each target binding site specifically binds one target molecule or specific position or locus on a target molecule. When an antibody is monovalent, each binding site of the molecule will specifically bind to a single antigen position or epitope. When an antibody comprises more than one target binding site (multivalent), each target binding site may specifically bind the same or different molecules (e.g., may bind to different ligands or different antigens, or different epitopes or positions on the same antigen).

[0175] In some embodiments, the DLL3 targeting trispecific proteins of this disclosure contain inter alia one or more additional amino acid residue substitutions, mutations and/or modifications which result in a compound with preferred characteristics including, but not limited to: altered pharmacokinetics, increased serum half-life, increase binding affinity, reduced immunogenicity, increased production, altered Fc ligand binding to an Fc receptor (FcR), enhanced or reduced “ADCC” (antibody-dependent cell mediated cytotoxicity) or “CDC” (complement-dependent cytotoxicity) activity, altered glycosylation and/or disulfide bonds and modified binding specificity. In some cases, these DLL3 targeting trispecific protein variants are advantageously used to enhance the effective anti-neoplastic properties of the disclosed DLL3 targeting trispecific proteins.

[0176] In some embodiments, the DLL3 targeting trispecific proteins of the disclosure have half-lives in a mammals, such as in a human, or in a cynomolgus monkey of less than about 5 days, about 5 days, greater than about 5 days, greater than 10 days, greater than about 15 days, greater than about 20 days, greater than about 25 days, greater than about 30 days, greater than about 35 days, greater than about 40 days, greater than about 45 days, greater than about 2 months, greater than about 3 months, greater than about 4 months, or greater than about 5 months. The increased half-life, in some cases, results in a higher serum titer which thus reduces the frequency of the administration of the DLL3 targeting trispecific proteins, reduces the concentration of the antibodies to be administered, or both.

[0177] Still other embodiments comprise one or more engineered glycoforms, i.e., a DLL3 targeting trispecific binding protein comprising an altered glycosylation pattern or altered carbohydrate composition that is covalently attached to the protein. Engineered glycoforms are useful, in some cases, for a variety of purposes, including but not limited to enhancing or reducing effector function, increasing the affinity of the trispecific protein for a target or facilitating production of the trispecific protein. In certain embodiments where reduced effector function is desired, the molecule is engineered to express an aglycosylated form. Substitutions that result in elimination of one or more variable region framework glycosylation sites to thereby eliminate glycosylation at that site, are included in some embodiments. Conversely, enhanced effector functions or improved binding is imparted to the Fc containing trispecific proteins of this disclosure by engineering in one or more additional glycosylation sites, in some cases.

[0178] The DLL3 targeting trispecific proteins, in some cases, are differentially modified during or after production, by glycosylation, acetylation, phosphorylation, amidation, derivatization by known protecting/blocking groups, proteolytic cleavage, linkage to an antibody molecule or other cellular ligand, etc. Any of numerous chemical modifications are carried out by techniques, including but not limited, to specific chemical cleavage by cyanogen bromide, trypsin, chymotrypsin, papain, V8 protease, NaBH4, acetylation, formylation, oxidation, reduction, metabolic synthesis in the presence of tunicamycin etc.

[0179] Various post-translational modifications also encompassed by the disclosure include, for example, N-linked or O-linked carbohydrate chains, processing of N-terminal or C-terminal ends, attachment of chemical moieties to the amino acid backbone, chemical modifications of N-linked or O-linked carbohydrate chains, and addition or deletion of an N-terminal methionine residue as a result of prokaryotic host cell expression. Moreover, the DLL3 targeting trispecific binding proteins are, in some cases, modified with a detectable label, such as an enzymatic, fluorescent, radioisotopic or affinity label to allow for detection and isolation of the modulator.

### Polynucleotides Encoding DLL3 Targeting Trispecific Proteins

[0180] Also provided, in some embodiments, are polynucleotide molecules encoding an anti-DLL3 trispecific binding protein described herein. In some embodiments, the polynucleotide molecules are provided as a DNA construct. In other embodiments, the polynucleotide molecules are provided as a messenger RNA transcript.

[0181] The polynucleotide molecules are constructed by known methods such as by combining the genes encoding the three binding domains either separated by peptide linkers or, in other embodiments, directly linked by a peptide bond, into a single genetic construct operably linked to a suitable promoter, and optionally a suitable transcription terminator, and expressing it in bacteria or other appropriate expression system such as, for example CHO cells. In the embodiments where the DLL3 binding domain is a small molecule, the polynucleotides contain genes encoding the CD3 binding domain and the half-life extension domain. In the embodiments where the half-life extension domain is a small molecule, the polynucleotides contain genes encoding the domains that bind to CD3 and DLL3. Depending on the vector system and host utilized, any number of suitable transcription and translation elements, including constitutive and inducible promoters, may be used. The promoter is selected such that it drives the expression of the polynucleotide in the respective host cell.

[0182] In some embodiments, the polynucleotide is inserted into a vector, preferably an expression vector, which represents a further embodiment. This recombinant vector can be constructed according to known methods. Vectors of particular interest include plasmids, phagemids, phage derivatives, virii (e.g., retroviruses, adenoviruses, adeno-associated viruses, herpes viruses, lentiviruses, and the like), and cosmids.

[0183] A variety of expression vector/host systems may be utilized to contain and express the polynucleotide encoding the polypeptide of the described trispecific antigen-binding protein. Examples of expression vectors for expression in E. coli are pSKK (Le Gall et al., J Immunol Methods. (2004) 285(1):111-27) or pcDNA5 (Invitrogen) for expression in mammalian cells.

[0184] Thus, the DLL3 targeting trispecific proteins as described herein, in some embodiments, are produced by introducing a vector encoding the protein as described above into a host cell and culturing said host cell under conditions whereby the protein domains are expressed, may be isolated and, optionally, further purified.

### Pharmaceutical Compositions

[0185] Also provided, in some embodiments, are pharmaceutical compositions comprising an anti-DLL3 trispecific binding protein described herein, a vector comprising the polynucleotide encoding the polypeptide of the DLL3 targeting trispecific proteins or a host cell transformed by this vector and at least one pharmaceutically acceptable carrier. The term “pharmaceutically acceptable carrier” includes, but is not limited to, any carrier that does not interfere with the effectiveness of the biological activity of the ingredients and that is not toxic to the patient to whom it is administered. Examples of suitable pharmaceutical carriers are well known in the art and include phosphate buffered saline solutions, water, emulsions, such as oil/water emulsions, various types of wetting agents, sterile solutions etc. Such carriers can be formulated by conventional methods and can be administered to the subject at a suitable dose. Preferably, the compositions are sterile. These compositions may also contain adjuvants such as preservative, emulsifying agents and dispersing agents. Prevention of the action of microorganisms may be ensured by the inclusion of various antibacterial and antifungal agents. A further embodiment provides one or more of the above described DLL3 targeting trispecific proteins packaged in lyophilized form, or packaged in an aqueous medium.

[0186] In some embodiments of the pharmaceutical compositions, the DLL3 targeting trispecific proteins described herein are encapsulated in nanoparticles. In some embodiments, the nanoparticles are fullerenes, liquid crystals, liposome, quantum dots, superparamagnetic nanoparticles, dendrimers, or nanorods. In other embodiments of the pharmaceutical compositions, the DLL3 targeting trispecific protein is attached to liposomes. In some instances, the DLL3 targeting trispecific proteins are conjugated to the surface of liposomes. In some instances, the DLL3 trispecific antigen-binding protein are encapsulated within the shell of a liposome. In some instances, the liposome is a cationic liposome.

[0187] The DLL3 targeting trispecific proteins described herein are contemplated for use as a medicament. Administration is effected by different ways, by intravenous, intraperitoneal, subcutaneous, intramuscular, topical or intradermal administration. In some embodiments, the route of administration depends on the kind of therapy and the kind of compound contained in the pharmaceutical composition. The dosage regimen will be determined by the attending physician and other clinical factors. Dosages for any one patient depends on many factors, including the patient's size, body surface area, age, sex, the particular compound to be administered, time and route of administration, the kind of therapy, general health and other drugs being administered concurrently. An “effective dose” refers to amounts of the active ingredient that are sufficient to affect the course and the severity of the disease, leading to the reduction or remission of such pathology and may be determined using known methods.

[0188] In some embodiments, the DLL3 targeting trispecific proteins of this disclosure are administered at a dosage of up to 10 mg/kg at a frequency of once a week. In some cases, the dosage ranges from about 1 ng/kg to about 10 mg/kg. In some embodiments, the dose is from about 1 ng/kg to about 10 ng/kg, about 5 ng/kg to about 15 ng/kg, about 12 ng/kg to about 20 ng/kg, about 18 ng/kg to about 30 ng/kg, about 25 ng/kg to about 50 ng/kg, about 35 ng/kg to about 60 ng/kg, about 45 ng/kg to about 70 ng/kg, about 65 ng/kg to about 85 ng/kg, about 80 ng/kg to about 1 μg/kg, about 0.5 μg/kg to about 5 μg/kg, about 2 μg/kg to about 10 μg/kg, about 7 μg/kg to about 15 μg/kg, about 12 μg/kg to about 25 μg/kg, about 20 μg/kg to about 50 μg/kg, about 35 μg/kg to about 70 μg/kg, about 45 μg/kg to about 80 μg/kg, about 65 μg/kg to about 90 μg/kg, about 85 μg/kg to about 0.1 mg/kg, about 0.095 mg/kg to about 10 mg/kg. In some cases, the dosage is about 0.1 mg/kg to about 0.2 mg/kg; about 0.25 mg/kg to about 0.5 mg/kg, about 0.45 mg/kg to about 1 mg/kg, about 0.75 mg/kg to about 3 mg/kg, about 2.5 mg/kg to about 4 mg/kg, about 3.5 mg/kg to about 5 mg/kg, about 4.5 mg/kg to about 6 mg/kg, about 5.5 mg/kg to about 7 mg/kg, about 6.5 mg/kg to about 8 mg/kg, about 7.5 mg/kg to about 9 mg/kg, or about 8.5 mg/kg to about 10 mg/kg. The frequency of administration, in some embodiments, is about less than daily, every other day, less than once a day, twice a week, weekly, once in 7 days, once in two weeks, once in two weeks, once in three weeks, once in four weeks, or once a month. In some cases, the frequency of administration is weekly. In some cases, the frequency of administration is weekly and the dosage is up to 10 mg/kg. In some cases, duration of administration is from about 1 day to about 4 weeks or longer.

[0189] In some embodiments, the DLL3 targeting trispecific proteins of this disclosure are administered at a dosage of about 1 μg to about 100 μg, about 1 μg to about 500 μg, about 1 μg to about 1 mg, about 1 μg to about 2 mg, about 1 μg to about 5 mg, about 1 μg to about 10 mg, about 1 μg to about 100 mg, about 100 μg to about 500 μg, about 100 μg to about 1 mg, about 100 μg to about 2 mg, about 100 μg to about 5 mg, about 100 μg to about 10 mg, about 100 μg to about 100 mg, about 500 μg to about 1 mg, about 500 μg to about 2 mg, about 500 μg to about 5 mg, about 500 μg to about 10 mg, about 500 μg to about 100 mg, about 1 mg to about 2 mg, about 1 mg to about 5 mg, about 1 mg to about 10 mg, about 1 mg to about 100 mg, about 2 mg to about 5 mg, about 2 mg to about 10 mg, about 2 mg to about 100 mg, about 5 mg to about 10 mg, about 5 mg to about 100 mg, or about 10 mg to about 100 mg. In some embodiments, the DLL3 targeting trispecific proteins of this disclosure are administered at a dosage of about 15 μg to about 45 μg, about 15 μg to about 135 μg, about 15 μg to about 405 μg, about 15 μg to about 1215 μg, about 15 μg to about 3600 μg, about 45 μg to about 135 μg, about 45 μg to about 405 μg, about 45 μg to about 1215 μg, about 45 μg to about 3600 μg, about 135 μg to about 405 μg, about 135 μg to about 1215 μg, about 135 μg to about 3600 μg, about 405 μg to about 1215 μg, about 405 μg to about 3600 μg, or about 1215 μg to about 3600 μg. In some embodiments, the first dose is about 5 mg. In some embodiments, the dose is about 7 mg. In some embodiments, the dose is about 10 mg. In some embodiments, the dose is about 12 mg. In some embodiments, the dose is about 15 mg. In some embodiments, the dose is about 20 mg. In some embodiments, the dose is about 30 mg. In some embodiments, the dose is about 40 mg. In some embodiments, the dose is about 50 mg. In some embodiments, the dose is about 70 mg. In some embodiments, the dose is about 100 mg.

[0190] The DLL3 targeting trispecific protein described herein can be administered using different dosages. In some embodiments, the DLL3 targeting trispecific protein of this disclosure is administered according to a schedule comprising the following steps: (i) administration of a first dose of the DLL3 targeting trispecific protein, and (ii) administration of a second dose of the DLL3 targeting trispecific protein, wherein the second dose is higher than the first dose. In some embodiments, the schedule further comprises step (iii) administration of a third dose of the DLL3 targeting trispecific protein, wherein the third dose is higher than the second dose. In some embodiments, the schedule further comprises step (iv) administration of a fourth dose of the DLL3 targeting trispecific protein, wherein the fourth dose is higher than the third dose. In some embodiments, the schedule further comprises step (v) administration of a fifth dose of the DLL3 targeting trispecific protein, wherein the fifth dose is higher than the fourth dose.

[0191] In some embodiments, the first dose is about 1 μg to about 100 μg, about 1 μg to about 500 μg, about 1 μg to about 1 mg, about 1 μg to about 2 mg, about 1 μg to about 5 mg, about 1 μg to about 5 mg, about 1 μg to about 8 mg, about 1 μg to about 10 mg, about 1 μg to about 50 mg, about 1 μg to about 100 mg about 100 μg to about 500 μg, about 100 μg to about 1 mg, about 100 μg to about 2 mg, about 100 μg to about 5 mg, about 100 μg to about 5 mg, about 100 μg to about 8 mg, about 100 μg to about 10 mg, about 100 μg to about 50 mg, about 100 μg to about 100 mg, about 500 μg to about 1 mg, about 500 μg to about 2 mg, about 500 μg to about 5 mg, about 500 μg to about 5 mg, about 500 μg to about 8 mg, about 500 μg to about 10 mg, about 500 μg to about 50 mg, about 500 μg to about 100 mg, about 1 mg to about 2 mg, about 1 mg to about 5 mg, about 1 mg to about 8 mg, about 1 mg to about 10 mg, about 1 mg to about 50 mg, about 1 mg to about 100 mg, about 2 mg to about 5 mg, about 2 mg to about 8 mg, about 2 mg to about 10 mg, about 2 mg to about 50 mg, about 2 mg to about 100 mg, about 5 mg to about 8 mg, about 5 mg to about 10 mg, about 5 mg to about 50 mg, about 5 mg to about 100 mg, about 8 mg to about 10 mg, about 8 mg to about 50 mg, about 8 mg to about 100 mg, about 10 mg to about 50 mg, or about 50 mg to about 100 mg. In some embodiments, the first dose is about 5 μg. In some embodiments, the first dose is about 15 μg. In some embodiments, the first dose is about 45 μg. In some embodiments, the first dose is about 135 μg. In some embodiments, the first dose is about 405 μg. In some embodiments, the first dose is about 1215 μg. In some embodiments, the first dose is about 1500 μg. In some embodiments, the first dose is about 2000 μg. In some embodiments, the first dose is about 2500 μg. In some embodiments, the first dose is about 3600 μg. In some embodiments, the first dose is about 3 mg. In some embodiments, the first dose is about 4 mg. In some embodiments, the first dose is about 5 mg. In some embodiments, the first dose is about 6 mg. In some embodiments, the first dose is about 7 mg. In some embodiments, the first dose is about 8 mg. In some embodiments, the first dose is about 9 mg. In some embodiments, the first dose is about 10 mg. In some embodiments, the first dose is about 11 mg. In some embodiments, the first dose is about 12 mg. In some embodiments, the first dose is about 15 mg. In some embodiments, the first dose is about 20 mg. In some embodiments, the first dose is about 30 mg. In some embodiments, the first dose is about 40 mg. In some embodiments, the first dose is about 50 mg. In some embodiments, the first dose is about 70 mg. In some embodiments, the first dose is about 100 mg.

[0192] In some embodiments, the first dose is administered for about 1 week to about 5 weeks, about 1 week to about 10 weeks, about 1 week to about 20 weeks, about 1 week to about 50 weeks, about 1 week to about 80 weeks, about 1 week to about 100 weeks, about 5 weeks to about 10 weeks, about 5 weeks to about 20 weeks, about 5 weeks to about 50 weeks, about 5 weeks to about 80 weeks, about 5 weeks to about 100 weeks, about 10 weeks to about 20 weeks, about 10 weeks to about 50 weeks, about 10 weeks to about 80 weeks, about 10 weeks to about 100 weeks, about 20 weeks to about 50 weeks, about 20 weeks to about 80 weeks, about 20 weeks to about 100 weeks, about 50 weeks to about 80 weeks, about 50 weeks to about 100 weeks, about 80 weeks to about 100 weeks, about 1 week to about 9 weeks, about 1 week to about 18 weeks, about 1 week to about 27 weeks, about 1 week to about 36 weeks, about 9 weeks to about 18 weeks, about 9 weeks to about 27 weeks, about 9 weeks to about 36 weeks, about 18 weeks to about 27 weeks, about 18 weeks to about 36 weeks, or about 27 weeks to about 36 weeks.

[0193] In some embodiments, the first dose is administered once per day, twice per day, three times per day, four times per day, five times per day, six times per day, seven times per day, eight times per day, nine times per day or ten times per day. In some embodiments, the first dose is administered once per week, twice per week, three times per week, four times per week, five times per week, six times per week, once every other week, once every three weeks, once every four week or once every five weeks.

[0194] In some embodiments, the second dose is about 1 μg to about 100 μg, about 1 μg to about 500 μg, about 1 μg to about 1 mg, about 1 μg to about 2 mg, about 1 μg to about 5 mg, about 1 μg to about 5 mg, about 1 μg to about 8 mg, about 1 μg to about 10 mg, about 1 μg to about 50 mg, about 1 μg to about 100 mg about 100 μg to about 500 μg, about 100 μg to about 1 mg, about 100 μg to about 2 mg, about 100 μg to about 5 mg, about 100 μg to about 5 mg, about 100 μg to about 8 mg, about 100 μg to about 10 mg, about 100 μg to about 50 mg, about 100 μg to about 100 mg, about 500 μg to about 1 mg, about 500 μg to about 2 mg, about 500 μg to about 5 mg, about 500 μg to about 5 mg, about 500 μg to about 8 mg, about 500 μg to about 10 mg, about 500 μg to about 50 mg, about 500 μg to about 100 mg, about 1 mg to about 2 mg, about 1 mg to about 5 mg, about 1 mg to about 8 mg, about 1 mg to about 10 mg, about 1 mg to about 50 mg, about 1 mg to about 100 mg, about 2 mg to about 5 mg, about 2 mg to about 8 mg, about 2 mg to about 10 mg, about 2 mg to about 50 mg, about 2 mg to about 100 mg, about 5 mg to about 8 mg, about 5 mg to about 10 mg, about 5 mg to about 50 mg, about 5 mg to about 100 mg, about 8 mg to about 10 mg, about 8 mg to about 50 mg, about 8 mg to about 100 mg, about 10 mg to about 50 mg, or about 50 mg to about 100 mg. In some embodiments, the second dose is about 1.2 mg. In some embodiments, the second dose is about 2 mg. In some embodiments, the second dose is about 3 mg. In some embodiments, the second dose is about 4 mg. In some embodiments, the second dose is about 5 mg. In some embodiments, the second dose is about 6 mg. In some embodiments, the second dose is about 7 mg. In some embodiments, the second dose is about 8 mg. In some embodiments, the second dose is about 9 mg. In some embodiments, the second dose is about 10 mg. In some embodiments, the second dose is about 11 mg. In some embodiments, the second dose is about 12 mg. In some embodiments, the second dose is about 13 mg. In some embodiments, the second dose is about 14 mg. In some embodiments, the second dose is about 15 mg. In some embodiments, the second dose is about 20 mg. In some embodiments, the second dose is about 30 mg. In some embodiments, the second dose is about 40 mg. In some embodiments, the second dose is about 50 mg. In some embodiments, the second dose is about 70 mg. In some embodiments, the second dose is about 100 mg. In some embodiments, the second dose is about 3.6 mg. In some embodiments, the second dose is about 7.2 mg. In some embodiments, the second dose is about 12 mg. In some embodiments, the second dose is about 24 mg. In some embodiments, the second dose is about 36 mg. In some embodiments, the second dose is about 48 mg. In some embodiments, the second dose is about 60 mg. In some embodiments, the second dose is about 72 mg. In some embodiments, the second dose is about 84 mg. In some embodiments, the second dose is about 96 mg.

[0195] In some embodiments, the second dose is administered for about 1 week to about 5 weeks, about 1 week to about 10 weeks, about 1 week to about 20 weeks, about 1 week to about 50 weeks, about 1 week to about 80 weeks, about 1 week to about 100 weeks, about 5 weeks to about 10 weeks, about 5 weeks to about 20 weeks, about 5 weeks to about 50 weeks, about 5 weeks to about 80 weeks, about 5 weeks to about 100 weeks, about 10 weeks to about 20 weeks, about 10 weeks to about 50 weeks, about 10 weeks to about 80 weeks, about 10 weeks to about 100 weeks, about 20 weeks to about 50 weeks, about 20 weeks to about 80 weeks, about 20 weeks to about 100 weeks, about 50 weeks to about 80 weeks, about 50 weeks to about 100 weeks, about 80 weeks to about 100 weeks, about 1 week to about 9 weeks, about 1 week to about 18 weeks, about 1 week to about 27 weeks, about 1 week to about 36 weeks, about 9 weeks to about 18 weeks, about 9 weeks to about 27 weeks, about 9 weeks to about 36 weeks, about 18 weeks to about 27 weeks, about 18 weeks to about 36 weeks, or about 27 weeks to about 36 weeks.

[0196] In some embodiments, the second dose is administered once per day, twice per day, three times per day, four times per day, five times per day, six times per day, seven times per day, eight times per day, nine times per day or ten times per day. In some embodiments, the first dose is administered once per week, twice per week, three times per week, four times per week, five times per week, six times per week, once every other week, once every three weeks, once every four week or once every five weeks.

[0197] In some embodiments, the first dose is about 3.6 mg and the second dose is about 7.2 mg. In some embodiments, the first dose is about 3 mg and the second dose is about 14 mg, which is administered weekly. In some embodiments, the first dose is about 3 mg and the second dose is about 7 mg, which is administered weekly. In some embodiments, the first dose is about 3 mg and the second dose is about 7 mg, which is administered every other week.

### Methods of Treatment

[0198] In some embodiments, the DLL3 binding proteins, or DLL3 targeting trispecific proteins of the present disclosure is administered to treat a neoplastic condition. Neoplastic conditions, in some embodiments, are benign or malignant; solid tumors or other blood neoplasia; and, in some embodiments, are selected from the group including, but not limited to: adrenal gland tumors, AIDS-associated cancers, alveolar soft part sarcoma, astrocytic tumors, autonomic ganglia tumors, bladder cancer (squamous cell carcinoma and transitional cell carcinoma), blastocoelic disorders, bone cancer (adamantinoma, aneurismal bone cysts, osteochondroma, osteosarcoma), brain and spinal cord cancers, metastatic brain tumors, breast cancer including triple negative breast cancer, carotid body tumors, cervical cancer, chondrosarcoma, chordoma, chromophobe renal cell carcinoma, clear cell carcinoma, colon cancer, colorectal cancer, cutaneous benign fibrous histiocytomas, desmoplastic small round cell tumors, ependymomas, epithelial disorders, Ewing's tumors, extraskeletal myxoid chondrosarcoma, fibrogenesis imperfecta ossium, fibrous dysplasia of the bone, gallbladder and bile duct cancers, gastric cancer, gastrointestinal, gestational trophoblastic disease, germ cell tumors, glandular disorders, head and neck cancers, hypothalamic, intestinal cancer, islet cell tumors, Kaposi's Sarcoma, kidney cancer (nephroblastoma, papillary renal cell carcinoma), leukemias, lipoma/benign lipomatous tumors, liposarcoma/malignant lipomatous tumors, liver cancer (hepatoblastoma, hepatocellular carcinoma), lymphomas, lung cancers (small cell carcinoma, adenocarcinoma, squamous cell carcinoma, large cell carcinoma etc.), macrophagal disorders, medulloblastoma, melanoma, meningiomas, multiple endocrine neoplasia, multiple myeloma, myelodysplastic syndrome, neuroblastoma, neuroendocrine tumors, ovarian cancer, pancreatic cancers, papillary thyroid carcinomas, parathyroid tumors, pediatric cancers, peripheral nerve sheath tumors, phaeochromocytoma, pituitary tumors, prostate cancer, posterious unveal melanoma, rare hematologic disorders, renal metastatic cancer, rhabdoid tumor, rhabdomysarcoma, sarcomas, skin cancer, soft-tissue sarcomas, squamous cell cancer, stomach cancer, stromal disorders, synovial sarcoma, testicular cancer, thymic carcinoma, thymoma, thyroid metastatic cancer, and uterine cancers (carcinoma of the cervix, endometrial carcinoma, and leiomyoma).

[0199] In certain embodiments the DLL3 binding proteins, or the DLL3 targeting trispecific proteins of the present disclosure is used as a front-line therapy and administered to subjects who have not previously been treated for the cancerous condition. In other embodiments the DLL3 targeting trispecific proteins of the present disclosure are used to treat subjects that have previously been treated (with a DLL3 targeting trispecific protein of this disclosure or with other anti-cancer agent) and have relapsed or determined to be refractory to the previous treatment. In some embodiments the DLL3 targeting trispecific proteins of the present disclosure are used to treat subjects that have recurrent tumors.

[0200] In some aspects, the DLL3 binding proteins, or the DLL3 targeting trispecific proteins of the present disclosure are administered to treat a proliferative disorder comprising a solid tumor including, but not limited to, adrenal, liver, kidney, bladder, breast, gastric, ovarian, cervical, uterine, esophageal, colorectal, prostate, pancreatic, lung (both small cell and non-small cell), thyroid, carcinomas, sarcomas, glioblastomas and various head and neck tumors.

[0201] In some embodiments, the DLL3 binding proteins, or the DLL3 targeting trispecific proteins of the present disclosure are administered to a subject suffering from melanoma. In some embodiments, the DLL3 targeting trispecific proteins of the present disclosure are used to diagnose, monitor, treat or prevent melanoma. The term “melanoma,” as used herein, includes all types of melanoma including, but not limited to, primary melanoma, malignant melanoma, cutaneous melanoma, extracutaneous melanoma, superficial spreading melanoma, polypoid melanoma, melanocarcinomas, melanoepitheliomas, melanosarcomas, melanoma in situ, nodular malignant melanoma, lentigo maligna melanoma, lentiginous melanoma, lentiginous malignant melanoma, mucosal lentiginous melanoma, mucosal melanoma, acral lentiginous melanoma, soft tissue melanoma, ocular melanoma, invasive melanoma, familial atypical mole and melanoma (FAM-M) syndrome, desmoplastic malignant melanoma or uveal melanoma.

[0202] DLL3 is an effective tumor marker that is expressed on a number of different cancers and has been found to be associated with cancer stem cells. Thus, in some embodiments where the DLL3 binding proteins, or the DLL3 targeting trispecific proteins of the disclosure are incorporated in a chimeric antigen receptor expressed on lymphocytes, the resulting “DLL3 sensitized lymphocytes” (e.g., natural killer cells or T cells that immunospecifically recognize a DLL3 determinant) are able to effectively mount an immune response directed to aberrant DLL3 positive cells including cancer stem cells. This ability to effectively eliminate tumorigenic “seed” cells is often critical in reducing the possibility of tumor recurrence or metastasis. In some embodiments, such DLL3 sensitized lymphocytes are used in combination with other therapeutic agents or as part of a maintenance regimen following standard of care treatments.

[0203] More generally a chimeric antigen receptor is an artificially constructed hybrid protein or polypeptide containing or comprising an antigen binding domain of an antibody linked to a signaling domain (e.g., T-cell signaling or T-cell activation domains). In some embodiments, CARs comprising the DLL3 targeting trispecific binding protein of the present disclosure have the ability to redirect the specificity and reactivity of sensitized lymphocytes (e.g., T-cells) toward DLL3 positive target cells in a non-MHC-restricted manner by exploiting the antigen-binding properties of antibodies or antigen binding fragments thereof. The non-MHC-restricted antigen recognition gives T-cells expressing DLL3 CARs the ability to recognize tumorigenic DLL3 independent of antigen processing, thus bypassing a major mechanism of tumor escape. Moreover, when expressed in T-cells, CARs advantageously do not dimerize with endogenous T cell receptor (TCR) alpha and beta chains.

[0204] In selected aspects the DLL3 binding proteins, or the DLL3 targeting trispecific proteins of the disclosure is incorporated into a chimeric antigen receptor (CAR) and the DLL3 CAR is administered in a CAR based therapy effective at treating lung cancer, including the following subtypes: small cell lung cancer, non-small cell lung cancer (e.g., squamous cell non-small cell lung cancer or squamous cell small cell lung cancer) and large cell neuroendocrine carcinoma (LCNEC).

[0205] In some embodiments, the DLL3 binding proteins, or the DLL3 sensitive lymphocytes are administered to patients exhibiting limited stage disease or extensive stage disease. In other embodiments the disclosed DLL3 targeting trispecific antibodies are administered to refractory patients (i.e., those whose disease recurs during or shortly after completing a course of initial therapy); sensitive patients (i.e., those whose relapse is longer than 2-3 months after primary therapy); or patients exhibiting resistance to a platinum based agent (e.g., carboplatin, cisplatin, oxaliplatin) and/or a taxane (e.g., docetaxel, paclitaxel, larotaxel or cabazitaxel). In another embodiment the disclosed DLL3 CAR treatments are effective at treating ovarian cancer, including ovarian-serous carcinoma and ovarian-papillary serous carcinoma.

[0206] The disclosed DLL3 binding proteins, or the DLL3 targeting trispecific binding proteins, in some embodiments, are used to prevent, treat or diagnose tumors with neuroendocrine features or phenotypes including neuroendocrine tumors. True or canonical neuroendocrine tumors (NETs) arising from the dispersed endocrine system are relatively rare, with an incidence of 2-5 per 100,000 people, but highly aggressive. Neuroendocrine tumors occur in the kidney, genitourinary tract (bladder, prostate, ovary, cervix, and endometrium), gastrointestinal tract (colon, stomach), thyroid (medullary thyroid cancer), and lung (small cell lung carcinoma and large cell neuroendocrine carcinoma). These tumors may secrete several hormones including serotonin and/or chromogranin A that can cause debilitating symptoms known as carcinoid syndrome. Such tumors can be denoted by positive immunohistochemical markers such as neuron-specific enolase (NSE, also known as gamma enolase, gene symbol=ENO2), CD56 (or NCAM1), chromogranin A (CHGA), and synaptophysin (SYP) or by genes known to exhibit elevated expression such as ASCL1. Traditional chemotherapies have not been particularly effective in treating neuroendocrine tumors and liver metastasis is a common outcome. In some embodiments the disclosed DLL3 targeting trispecific antibodies are advantageously used to treat neuroendocrine tumors, and in some embodiments they are used to treat, prevent or diagnose pseudo neuroendocrine tumors (pNETs) that genotypically or phenotypically mimic, resemble or exhibit common traits with canonical neuroendocrine tumors. Pseudo neuroendocrine tumors or tumors with neuroendocrine features are tumors that arise from cells of the diffuse neuroendocrine system or from cells in which a neuroendocrine differentiation cascade has been aberrantly reactivated during the oncogenic process. Such pNETs commonly share certain phenotypic or biochemical characteristics with traditionally defined neuroendocrine tumors, including the ability to produce subsets of biologically active amines, neurotransmitters, and peptide hormones. Histologically, such tumors (NETs and pNETs) share a common appearance often showing densely connected small cells with minimal cytoplasm of bland cytopathology and round to oval stippled nuclei. In some embodiments of the present disclosure commonly expressed histological markers or genetic markers that are used to define neuroendocrine and pseudo neuroendocrine tumors include, but are not limited to, chromogranin A, CD56, synaptophysin, PGP9.5, ASCL1 and neuron-specific enolase (NSE). Accordingly, in some embodiments, the DLL3 targeting trispecific protein of the disclosure, the DLL3 CAR, or the DLL3 sensitized lymphocytes, or any combination thereof, of the present disclosure, are beneficially used to treat both pseudo neuroendocrine tumors and canonical neuroendocrine tumors, such as to treat neuroendocrine tumors (both NET and pNET) arising in the kidney, genitourinary tract (bladder, prostate, ovary, cervix, and endometrium), gastrointestinal tract (colon, stomach), thyroid (medullary thyroid cancer), and lung (small cell lung carcinoma and large cell neuroendocrine carcinoma). Moreover, in some embodiments, the DLL3 targeting trispecific protein of the disclosure, the DLL3 CAR, or the DLL3 sensitized lymphocytes, or any combination thereof are used to treat tumors expressing one or more markers such as NSE, CD56, synaptophysin, chromogranin A, ASCL1, or PGP9.5 (UCHL1). In some embodiments, the DLL3 targeting trispecific protein of the disclosure, the DLL3 CAR, or the DLL3 sensitized lymphocytes, or any combination thereof are used to treat a subject suffering from a tumor that is NSE+ or CD56+ or PGP9.5+ or ASCL1+ or SYP+ or CHGA+ or any combination thereof.

[0207] In another embodiment the DLL3 targeting trispecific protein of the disclosure, the DLL3 CAR, or the DLL3 sensitized lymphocytes, or any combination thereof are used in maintenance therapy to reduce or eliminate the chance of tumor recurrence following the initial presentation of the disease. In some cases, the disorder has been treated and the initial tumor mass eliminated, reduced or otherwise ameliorated so the patient is asymptomatic or in remission. At such time the subject is administered pharmaceutically effective amounts of the disclosed the DLL3 binding proteins, the DLL3 targeting trispecific protein of the disclosure, the DLL3 CAR, or the DLL3 sensitized lymphocytes, or any combination thereof one or more times regardless of if there is little or no indication of disease using standard diagnostic procedures. In some embodiments, the DLL3 targeting trispecific protein of the disclosure, the DLL3 CAR, or the DLL3 sensitized lymphocytes, or any combination thereof is administered on a regular schedule over a period of time, such as weekly, every two weeks, monthly, every six weeks, every two months, every three months every six months or annually, for example, to reduce the potential of disease recurrence. Moreover, such treatments are in some embodiments continued for a period of weeks, months, years or even indefinitely depending on the patient response and clinical and diagnostic parameters.

[0208] In yet another embodiment the DLL3 binding proteins, the DLL3 targeting trispecific protein of the disclosure, the DLL3 CAR, or the DLL3 sensitized lymphocytes, or any combination thereof are used to prophylactically or as an adjuvant therapy to prevent or reduce the possibility of tumor metastasis following a debulking procedure. As used in the present disclosure a “debulking procedure” is defined broadly and means any procedure, technique or method that eliminates, reduces, treats or ameliorates a tumor or tumor proliferation. Exemplary debulking procedures include, but are not limited to, surgery, radiation treatments (i.e., beam radiation), chemotherapy, immunotherapy or ablation. In some embodiments, at appropriate times, the DLL3 binding proteins, the DLL3 targeting trispecific protein of the disclosure, the DLL3 CAR, or the DLL3 sensitized lymphocytes, or any combination thereof are administered as suggested by clinical, diagnostic or theranostic procedures to reduce tumor metastasis. In some embodiments, the dosing regimen is accompanied by appropriate diagnostic or monitoring techniques that allow it to be modified.

[0209] Yet other embodiments of the disclosure comprise administering the DLL3 binding proteins, the DLL3 targeting trispecific protein of the disclosure, the DLL3 CAR, or the DLL3 sensitized lymphocytes, or any combination thereof to subjects that are asymptomatic but at risk of developing a proliferative disorder. That is, in some embodiments, the DLL3 binding proteins, the DLL3 targeting trispecific protein of the disclosure, the DLL3 CAR, or the DLL3 sensitized lymphocytes, or any combination thereof are used in preventative sense and given to patients that have been examined or tested and have one or more noted risk factors (e.g. genomic indications, family history, in vivo or in vitro test results, etc.) but have not developed neoplasia. In such cases those skilled in the art would be able to determine an effective dosing regimen through empirical observation or through accepted clinical practices.

[0210] As used herein, in some embodiments, “treatment” or “treating” or “treated” refers to therapeutic treatment wherein the object is to slow (lessen) an undesired physiological condition, disorder or disease, or to obtain beneficial or desired clinical results. For the purposes described herein, beneficial or desired clinical results include, but are not limited to, alleviation of symptoms; diminishment of the extent of the condition, disorder or disease; stabilization (i.e., not worsening) of the state of the condition, disorder or disease; delay in onset or slowing of the progression of the condition, disorder or disease; amelioration of the condition, disorder or disease state; and remission (whether partial or total), whether detectable or undetectable, or enhancement or improvement of the condition, disorder or disease. Treatment includes eliciting a clinically significant response without excessive levels of side effects. Treatment also includes prolonging survival as compared to expected survival if not receiving treatment. In other embodiments, “treatment” or “treating” or “treated” refers to prophylactic measures, wherein the object is to delay onset of or reduce severity of an undesired physiological condition, disorder or disease, such as, for example is a person who is predisposed to a disease (e.g., an individual who carries a genetic marker for a disease such as breast cancer).

[0211] In some embodiments of the methods described herein, the DLL3 binding proteins, the DLL3 targeting trispecific proteins, or compositions as described herein are administered in combination with an agent for treatment of the particular disease, disorder or condition. Agents include but are not limited to, therapies involving antibodies, small molecules (e.g. chemotherapeutics), hormones (steroidal, peptide, and the like), radiotherapies (γ-rays, X-rays, and/or the directed delivery of radioisotopes, microwaves, UV radiation and the like), gene therapies (e.g., antisense, retroviral therapy and the like) and other immunotherapies. In some embodiments, an anti-DLL3 binding protein, or an anti-DLL3 targeting trispecific protein as described herein is administered in combination with anti-diarrheal agents, anti-emetic agents, analgesics, opioids and/or non-steroidal anti-inflammatory agents. In some embodiments, an anti-DLL3 binding protein, or an anti-DLL3 targeting trispecific protein as described herein is administered in combination with anti-cancer agents. Non-limiting examples of anti-cancer agents that can be used in the various embodiments of the disclosure, including pharmaceutical compositions and dosage forms and kits of the disclosure, include: acivicin; aclarubicin; acodazole hydrochloride; acronine; adozelesin; aldesleukin; altretamine; ambomycin; ametantrone acetate; aminoglutethimide; amsacrine; anastrozole; anthramycin; asparaginase; asperlin; azacitidine; azetepa; azotomycin; batimastat; benzodepa; bicalutamide; bisantrene hydrochloride; bisnafide dimesylate; bizelesin; bleomycin sulfate; brequinar sodium; bropirimine; busulfan; cactinomycin; calusterone; caracemide; carbetimer; carboplatin; carmustine; carubicin hydrochloride; carzelesin; cedefingol; chlorambucil; cirolemycin; cisplatin; cladribine; crisnatol mesylate; cyclophosphamide; cytarabine; dacarbazine; dactinomycin; daunorubicin hydrochloride; decitabine; dexormaplatin; dezaguanine; dezaguanine mesylate; diaziquone; docetaxel; doxorubicin; doxorubicin hydrochloride; droloxifene; droloxifene citrate; dromostanolone propionate; duazomycin; edatrexate; eflornithine hydrochloride; elsamitrucin; enloplatin; enpromate; epipropidine; epirubicin hydrochloride; erbulozole; esorubicin hydrochloride; estramustine; estramustine phosphate sodium; etanidazole; etoposide; etoposide phosphate; etoprine; fadrozole hydrochloride; fazarabine; fenretinide; floxuridine; fludarabine phosphate; fluorouracil; flurocitabine; fosquidone; fostriecin sodium; gemcitabine; gemcitabine hydrochloride; hydroxyurea; idarubicin hydrochloride; ifosfamide; ilmofosine; interleukin II (including recombinant interleukin II, or rIL2), interferon alpha-2a; interferon alpha-2b; interferon alpha-nl interferon alpha-n3; interferon beta-I a; interferon gamma-I b; iproplatin; irinotecan hydrochloride; lanreotide acetate; letrozole; leuprolide acetate; liarozole hydrochloride; lometrexol sodium; lomustine; losoxantrone hydrochloride; masoprocol; maytansine; mechlorethamine hydrochloride; megestrol acetate; melengestrol acetate; melphalan; menogaril; mercaptopurine; methotrexate; methotrexate sodium; metoprine; meturedepa; mitindomide; mitocarcin; mitocromin; mitogillin; mitomalcin; mitomycin; mitosper; mitotane; mitoxantrone hydrochloride; mycophenolic acid; nocodazole; nogalamycin; ormaplatin; oxisuran; paclitaxel; pegaspargase; peliomycin; pentamustine; peplomycin sulfate; perfosfamide; pipobroman; piposulfan; piroxantrone hydrochloride; plicamycin; plomestane; porfimer sodium; porfiromycin; prednimustine; procarbazine hydrochloride; puromycin; puromycin hydrochloride; pyrazofurin; riboprine; rogletimide; safingol; safingol hydrochloride; semustine; simtrazene; sparfosate sodium; sparsomycin; spirogermanium hydrochloride; spiromustine; spiroplatin; streptonigrin; streptozocin; sulofenur; talisomycin; tecogalan sodium; tegafur; teloxantrone hydrochloride; temoporfin; teniposide; teroxirone; testolactone; thiamiprine; thioguanine; thiotepa; tiazofurin; tirapazamine; toremifene citrate; trestolone acetate; triciribine phosphate; trimetrexate; trimetrexate glucuronate; triptorelin; tubulozole hydrochloride; uracil mustard; uredepa; vapreotide; verteporfin; vinblastine sulfate; vincristine sulfate; vindesine; vindesine sulfate; vinepidine sulfate; vinglycinate sulfate; vinleurosine sulfate; vinorelbine tartrate; vinzolidine sulfate; vinzolidine sulfate; vorozole; zeniplatin; zinostatin; zorubicin hydrochloride. Other examples of anti-cancer drugs include, but are not limited to: 20-epi-1,25 dihydroxyvitamin D3; 5-ethynyluracil; abiraterone; aclarubicin; acylfulvene; adecypenol; adozelesin; aldesleukin; ALL-TK antagonists; altretamine; ambamustine; amidox; amifostine; aminolevulinic acid; amrubicin; amsacrine; anagrelide; anastrozole; andrographolide; angiogenesis inhibitors; antagonist D; antagonist G; antarelix; anti-dorsalizing morphogenetic protein-1; antiandrogen, prostatic carcinoma; antiestrogen; antineoplaston; antisense oligonucleotides; aphidicolin glycinate; apoptosis gene modulators; apoptosis regulators; apurinic acid; ara-CDP-DL-PTBA; arginine deaminase; asulacrine; atamestane; atrimustine; axinastatin 1; axinastatin 2; axinastatin 3; azasetron; azatoxin; azatyrosine; baccatin III derivatives; balanol; batimastat; BCR/ABL antagonists; benzochlorins; benzoylstaurosporine; beta lactam derivatives; beta-alethine; betaclamycin B; betulinic acid; bFGF inhibitor; bicalutamide; bisantrene; bisaziridinylspermine; bisnafide; bistratene A; bizelesin; breflate; bropirimine; budotitane; buthionine sulfoximine; calcipotriol; calphostin C; camptothecin derivatives; canarypox IL-2; capecitabine; carboxamide-amino-triazole; carboxyamidotriazole; CaRest M3; CARN 700; cartilage derived inhibitor; carzelesin; casein kinase inhibitors (ICOS); castanospermine; cecropin B; cetrorelix; chlorins; chloroquinoxaline sulfonamide; cicaprost; cis-porphyrin; cladribine; clomifene analogues; clotrimazole; collismycin A; collismycin B; combretastatin A4; combretastatin analogue; conagenin; crambescidin 816; crisnatol; cryptophycin 8; cryptophycin A derivatives; curacin A; cyclopentanthraquinones; cycloplatam; cypemycin; cytarabine ocfosfate; cytolytic factor; cytostatin; dacliximab; decitabine; dehydrodidemnin B; deslorelin; dexamethasone; dexifosfamide; dexrazoxane; dexverapamil; diaziquone; didemnin B; didox; diethylnorspermine; dihydro-5-azacytidine; dihydrotaxol, 9-; dioxamycin; diphenyl spiromustine; docetaxel; docosanol; dolasetron; doxifluridine; droloxifene; dronabinol; duocarmycin SA; ebselen; ecomustine; edelfosine; edrecolomab; eflornithine; elemene; emitefur; epirubicin; epristeride; estramustine analogue; estrogen agonists; estrogen antagonists; etanidazole; etoposide phosphate; exemestane; fadrozole; fazarabine; fenretinide; filgrastim; finasteride; flavopiridol; flezelastine; fluasterone; fludarabine; fluorodaunorunicin hydrochloride; forfenimex; formestane; fostriecin; fotemustine; gadolinium texaphyrin; gallium nitrate; galocitabine; ganirelix; gelatinase inhibitors; gemcitabine; glutathione inhibitors; hepsulfam; heregulin; hexamethylene bisacetamide; hypericin; ibandronic acid; idarubicin; idoxifene; idramantone; ilmofosine; ilomastat; imidazoacridones; imiquimod; immunostimulant peptides; insulin-like growth factor-I receptor inhibitor; interferon agonists; interferons; interleukins; iobenguane; iododoxorubicin; ipomeanol, 4-; iroplact; irsogladine; isobengazole; isohomohalicondrin B; itasetron; jasplakinolide; kahalalide F; lamellarin-N triacetate; lanreotide; leinamycin; lenograstim; lentinan sulfate; leptolstatin; letrozole; leukemia inhibiting factor; leukocyte alpha interferon; leuprolide+estrogen+progesterone; leuprorelin; levamisole; liarozole; linear polyamine analogue; lipophilic disaccharide peptide; lipophilic platinum compounds; lissoclinamide 7; lobaplatin; lombricine; lometrexol; lonidamine; losoxantrone; HMG-CoA reductase inhibitor (such as but not limited to, Lovastatin, Pravastatin, Fluvastatin, Statin, Simvastatin, and Atorvastatin); loxoribine; lurtotecan; lutetium texaphyrin; lysofylline; lytic peptides; maitansine; mannostatin A; marimastat; masoprocol; maspin; matrilysin inhibitors; matrix metalloproteinase inhibitors; menogaril; merbarone; meterelin; methioninase; metoclopramide; MIF inhibitor; mifepristone; miltefosine; mirimostim; mismatched double stranded RNA; mitoguazone; mitolactol; mitomycin analogues; mitonafide; mitotoxin fibroblast growth factor-saporin; mitoxantrone; mofarotene; molgramostim; monoclonal antibody, human chorionic gonadotrophin; monophosphoryl lipid A+myobacterium cell wall sk; mopidamol; multiple drug resistance gene inhibitor; multiple tumor suppressor 1-based therapy; mustard anticancer agent; mycaperoxide B; mycobacterial cell wall extract; myriaporone; N-acetyldinaline; N-substituted benzamides; nafarelin; nagrestip; naloxone+pentazocine; napavin; naphterpin; nartograstim; nedaplatin; nemorubicin; neridronic acid; neutral endopeptidase; nilutamide; nisamycin; nitric oxide modulators; nitroxide antioxidant; nitrullyn; 06-benzylguanine; octreotide; okicenone; oligonucleotides; onapristone; ondansetron; ondansetron; oracin; oral cytokine inducer; ormaplatin; osaterone; oxaliplatin; oxaunomycin; paclitaxel; paclitaxel analogues; paclitaxel derivatives; palauamine; palmitoylrhizoxin; pamidronic acid; panaxytriol; panomifene; parabactin; pazelliptine; pegaspargase; peldesine; pentosan polysulfate sodium; pentostatin; pentrozole; perflubron; perfosfamide; perillyl alcohol; phenazinomycin; phenylacetate; phosphatase inhibitors; picibanil; pilocarpine hydrochloride; pirarubicin; piritrexim; placetin A; placetin B; plasminogen activator inhibitor; platinum complex; platinum compounds; platinum-triamine complex; porfimer sodium; porfiromycin; prednisone; propyl bis-acridone; prostaglandin J2; proteasome inhibitors; protein A-based immune modulator; protein kinase C inhibitor; protein kinase C inhibitors, microalgal; protein tyrosine phosphatase inhibitors; purine nucleoside phosphorylase inhibitors; purpurins; pyrazoloacridine; pyridoxylated hemoglobin polyoxyethylene conjugate; raf antagonists; raltitrexed; ramosetron; ras farnesyl protein transferase inhibitors; ras inhibitors; ras-GAP inhibitor; retelliptine demethylated; rhenium Re 186 etidronate; rhizoxin; ribozymes; RII retinamide; rogletimide; rohitukine; romurtide; roquinimex; rubiginone B1; ruboxyl; safingol; saintopin; SarCNU; sarcophytol A; sargramostim; Sdi 1 mimetics; semustine; senescence derived inhibitor 1; sense oligonucleotides; signal transduction inhibitors; signal transduction modulators; single chain antigen binding protein; sizofiran; sobuzoxane; sodium borocaptate; sodium phenylacetate; solverol; somatomedin binding protein; sonermin; sparfosic acid; spicamycin D; spiromustine; splenopentin; spongistatin 1; squalamine; stem cell inhibitor; stem-cell division inhibitors; stipiamide; stromelysin inhibitors; sulfinosine; superactive vasoactive intestinal peptide antagonist; suradista; suramin; swainsonine; synthetic glycosaminoglycans; tallimustine; tamoxifen methiodide; tauromustine; tazarotene; tecogalan sodium; tegafur; tellurapyrylium; telomerase inhibitors; temoporfin; temozolomide; teniposide; tetrachlorodecaoxide; tetrazomine; thaliblastine; thiocoraline; thrombopoietin; thrombopoietin mimetic; thymalfasin; thymopoietin receptor agonist; thymotrinan; thyroid stimulating hormone; tin ethyl etiopurpurin; tirapazamine; titanocene bichloride; topsentin; toremifene; totipotent stem cell factor; translation inhibitors; tretinoin; triacetyluridine; triciribine; trimetrexate; triptorelin; tropisetron; turosteride; tyrosine kinase inhibitors; tyrphostins; UBC inhibitors; ubenimex; urogenital sinus-derived growth inhibitory factor; urokinase receptor antagonists; vapreotide; variolin B; vector system, erythrocyte gene therapy; velaresol; veramine; verdins; verteporfin; vinorelbine; vinxaltine; Vitaxin®; vorozole; zanoterone; zeniplatin; zilascorb; and zinostatin stimalamer. Additional anti-cancer drugs are 5-fluorouracil and leucovorin. These two agents are particularly useful when used in methods employing thalidomide and a topoisomerase inhibitor. In some embodiments, the DLL3 targeting trispecific protein of the present disclosure is used in combination with gemcitabine. In some embodiments, the DLL3 targeting trispecific protein as described herein is administered before, during, or after surgery.

### Methods of Detection of DLL3 Expression and Diagnosis of DLL3-Associated Cancer

[0212] According to another embodiment of the disclosure, kits for detecting expression of DLL3 in vitro or in vivo are provided. The kits include the foregoing DLL3 binding proteins, DLL3 targeting trispecific proteins (e.g., a trispecific protein containing a labeled anti-DLL3 single domain antibody or antigen binding fragments thereof), and one or more compounds for detecting the label. In some embodiments, the label is selected from the group consisting of a fluorescent label, an enzyme label, a radioactive label, a nuclear magnetic resonance active label, a luminescent label, and a chromophore label.

[0213] In some cases, DLL3 expression is detected in a biological sample. The sample can be any sample, including, but not limited to, tissue from biopsies, autopsies and pathology specimens. Biological samples also include sections of tissues, for example, frozen sections taken for histological purposes. Biological samples further include body fluids, such as blood, serum, plasma, sputum, spinal fluid or urine. A biological sample is typically obtained from a mammal, such as a human or non-human primate.

[0214] In one embodiment, provided is a method of determining if a subject has cancer by contacting a sample from the subject with an anti-DLL3 single domain antibody or an anti-DLL3 trispecific protein as disclosed herein; and detecting binding of the single domain antibody to the sample. An increase in binding of the antibody to the sample as compared to binding of the antibody to a control sample identifies the subject as having cancer.

[0215] In another embodiment, provided is a method of confirming a diagnosis of cancer in a subject by contacting a sample from a subject diagnosed with cancer with an anti-DLL3 single domain antibody or an anti-DLL3 trispecific protein as disclosed herein; and detecting binding of the antibody to the sample. An increase in binding of the antibody to the sample as compared to binding of the antibody to a control sample confirms the diagnosis of cancer in the subject.

[0216] In some examples of the disclosed methods, the DLL3 binding protein, or the DLL3 binding single domain antibody of the trispecific protein is directly labeled. In some examples, the methods further include contacting a second antibody that specifically binds an anti-DLL3 single domain antibody or an anti-DLL3 trispecific protein with the sample; and detecting the binding of the second antibody. An increase in binding of the second antibody to the sample as compared to binding of the second antibody to a control sample detects cancer in the subject or confirms the diagnosis of cancer in the subject. In some cases, the cancer is a neuroendocrine cancer, prostate cancer, lung cancer, stomach cancer, squamous cell carcinoma, pancreatic cancer, cholangiocarcinoma, triple negative breast cancer or ovarian cancer, or any other type of cancer that expresses DLL3. In some examples, the control sample is a sample from a subject without cancer. In particular examples, the sample is a blood or tissue sample.

[0217] In some cases, the antibody that binds (for example specifically binds) DLL3 is directly labeled with a detectable label. In another embodiment, the antibody that binds (for example, specifically binds) DLL3 (the first antibody) is unlabeled and a second antibody or other molecule that can bind the antibody that specifically binds DLL3 is labeled. A second antibody is chosen such that it is able to specifically bind the specific species and class of the first antibody. For example, if the first antibody is a llama IgG, then the secondary antibody may be an anti-llama-IgG. Other molecules that can bind to antibodies include, without limitation, Protein A and Protein G, both of which are available commercially. Suitable labels for the antibody or secondary antibody are described above, and include various enzymes, prosthetic groups, fluorescent materials, luminescent materials, magnetic agents and radioactive materials. Non-limiting examples of suitable enzymes include horseradish peroxidase, alkaline phosphatase, beta-galactosidase, or acetylcholinesterase. Non-limiting examples of suitable prosthetic group complexes include streptavidin/biotin and avidin/biotin. Non-limiting examples of suitable fluorescent materials include umbelliferone, fluorescein, fluorescein isothiocyanate, rhodamine, dichlorotriazinylamine fluorescein, dansyl chloride or phycoerythrin. A non-limiting exemplary luminescent material is luminol; a non-limiting exemplary a magnetic agent is gadolinium, and non-limiting exemplary radioactive labels include 1251, 1311, 35S or 3H.

[0218] In an alternative embodiment, DLL3 can be assayed in a biological sample by a competition immunoassay utilizing DLL3 standards labeled with a detectable substance and an unlabeled antibody that specifically binds DLL3. In this assay, the biological sample, the labeled DLL3 standards and the antibody that specifically bind DLL3 are combined and the amount of labeled DLL3 standard bound to the unlabeled antibody is determined. The amount of DLL3 in the biological sample is inversely proportional to the amount of labeled DLL3 standard bound to the antibody that specifically binds DLL3.

[0219] The immunoassays and method disclosed herein can be used for a number of purposes. In one embodiment, the antibody that specifically binds DLL3 may be used to detect the production of DLL3 in cells in cell culture. In another embodiment, the antibody can be used to detect the amount of DLL3 in a biological sample, such as a tissue sample, or a blood or serum sample. In some examples, the DLL3 is cell-surface DLL3. In other examples, the DLL3 is soluble DLL3 (e.g., DLL3 in a cell culture supernatant or soluble DLL3 in a body fluid sample, such as a blood or serum sample).

[0220] In one embodiment, a kit is provided for detecting DLL3 in a biological sample, such as a blood sample or tissue sample. For example, to confirm a cancer diagnosis in a subject, a biopsy can be performed to obtain a tissue sample for histological examination. Alternatively, a blood sample can be obtained to detect the presence of soluble DLL3 protein or fragment. Kits for detecting a polypeptide will typically comprise a single domain antibody, according to the present disclosure, that specifically binds DLL3. In some embodiments, an antibody fragment, such as an scFv fragment, a VH domain, or a Fab is included in the kit. In a further embodiment, the antibody is labeled (for example, with a fluorescent, radioactive, or an enzymatic label).

[0221] In one embodiment, a kit includes instructional materials disclosing means of use of an antibody that binds DLL3. The instructional materials may be written, in an electronic form (such as a computer diskette or compact disk) or may be visual (such as video files), or provided through an electronic network, for example, over the internet, World Wide Web, an intranet, or other network. The kits may also include additional components to facilitate the particular application for which the kit is designed. Thus, for example, the kit may additionally contain means of detecting a label (such as enzyme substrates for enzymatic labels, filter sets to detect fluorescent labels, appropriate secondary labels such as a secondary antibody, or the like). The kits may additionally include buffers and other reagents routinely used for the practice of a particular method. Such kits and appropriate contents are well known to those of skill in the art.

[0222] In one embodiment, the diagnostic kit comprises an immunoassay. Although the details of the immunoassays may vary with the particular format employed, the method of detecting DLL3 in a biological sample generally includes the steps of contacting the biological sample with an antibody which specifically reacts, under immunologically reactive conditions, to a DLL3 polypeptide. The antibody is allowed to specifically bind under immunologically reactive conditions to form an immune complex, and the presence of the immune complex (bound antibody) is detected directly or indirectly.

[0223] Methods of determining the presence or absence of a cell surface marker are well known in the art. For example, the antibodies can be conjugated to other compounds including, but not limited to, enzymes, magnetic beads, colloidal magnetic beads, haptens, fluorochromes, metal compounds, radioactive compounds or drugs. The antibodies can also be utilized in immunoassays such as but not limited to radioimmunoassays (RIAs), ELISA, or immunohistochemical assays. The antibodies can also be used for fluorescence activated cell sorting (FACS). FACS employs a plurality of color channels, low angle and obtuse light-scattering detection channels, and impedance channels, among other more sophisticated levels of detection, to separate or sort cells (see U.S. Pat. No. 5,061,620). Any of the single domain antibodies that bind DLL3, as disclosed herein, can be used in these assays. Thus, the antibodies can be used in a conventional immunoassay, including, without limitation, an ELISA, an RIA, FACS, tissue immunohistochemistry, Western blot or imunoprecipitation.

### EXAMPLES

### Example 1: Screening of Phage Display Library for Identification of DLL3 Binding Domains

[0224] Llamas were immunized with purified DLL3 protein expressed in EXPI293™ cells. A phage display library for expression of heavy chain variable antibody domains was constructed from circulating B cells (see, van der Linden, de Geus, Stok, Bos, van Wassenaar, Verrips, and Frenken. 2000. J Immunol Methods 240:185-195). Phage clones were screening for binding to DLL3 by expressing the clones in E coli, preparing periplasmic extracts, and screening the clones for DLL3 binding activity by ELISA. Fifty-two unique heavy chain only single domain antibodies were identified that produced a signal in the ELISA screening (SEQ ID NOS: 1 to 52). The CDR1, CDR2, and CDR3 sequences for these heavy variable domains were, respectively, SEQ ID NOS: 443 to 494, SEQ ID NOS: 885 to 936, and SEQ ID NOS: 1327 to 1378.

### Example 2: Humanization of DLL3 Binding Single Domain Antibodies and T Cell Dependent Cellular Cytotoxicity Assay

[0225] Thirty-four (SEQ ID NOS: 53 to 86) exemplary llama anti-DLL3 heavy chain only single domain antibodies from Example 1 were humanized. The CDR1, CDR2, and CDR3 sequences for the 34 heavy chain only single domain antibodies were, respectively, SEQ ID NOS: 495 to 528, SEQ ID NOS: 937 to 970, and SEQ ID NOS: 1379 to 1412.

[0226] The humanized anti-DLL3 sequences were cloned into an expression vector, in an expression construct comprising a signal domain followed by an anti-DLL3 heavy chain only variable domain followed by a GGGGSGGGS linker (SEQ ID NO: 1808) followed by anti-human albumin single domain antibody 10 G (SEQ ID NO: 1774) followed by a GGGGSGGGS linker (SEQ ID NO: 1808) followed by anti-human CD3 antibody 2B2 (SEQ ID No. 1793) followed by a HHHHHH tag (SEQ ID NO: 1819), to generate anti-DLL3 trispecific constructs.

[0227] The anti-DLL3 trispecific constructs containing the humanized anti-DLL3 binding sequences were then transfected into EXPI293™ cells. These anti-DLL3 trispecific constructs have an engineered with a protein A binding site, and the amount of anti-DLL3 trispecific construct in the conditioned media from the transfected EXPI293™ cells was quantitated using an Octet instrument with protein A tips. A trispecific protein of similar molecular weight as the anti-DLL3 trispecific proteins was used as a standard.

[0228] Using conditioned media containing known concentrations of anti-DLL3 trispecific proteins, the binding affinities of the anti-DLL3 trispecific proteins toward human and cynomolgus monkey DLL3 proteins were measured, using a method where the DLL3 proteins were expressed as human IgG1-Fc fusions and the measurements were carried out using an Octet instrument with anti-human Fc tips. The β_{D} measurements were made using a single 50 nM concentration of the anti-DLL3 trispecific proteins, which allowed for rank ordering based on potency. The relative affinities, measured as described above, are listed in Table 1. All of the sequences were found to bind human DLL3, with relative affinities (K_{D}) ranging from 0.5 to 42 nM. Some of the sequences were found to bind cynomolgus DLL3 with similar affinities to human DLL3, and the relative affinities for the binding of those sequences to cynomolgus DLL3 are also shown in Table 1.

[0229] The conditioned media were also tested in a T-cell dependent cellular cytotoxicity assay (see, Nazarian A A, Archibeque I L, Nguyen Y H, Wang P, Sinclair A M, Powers D A. 2015. J Biomol Screen. 20:519-27). In this assay, luciferase labelled DMS-153 cells (small-cell lung carcinoma cell line; ATCC NO: ATCC® CRL-2064™) were combined with purified human T cells, from a donor, and a titration of the anti-DLL3 trispecific proteins being tested.

[0230] It was hypothesized that if an anti-DLL3 trispecific protein directed T cells to kill the DLL3-expressing DMS-153 cells, then the viability of the DMS-153 cells, as determined by running a luciferase assay at 48 hours after starting the experiment, should decrease.

[0231] As illustrated in FIGS. 2-6, which show graphs of representative TDCC data, several exemplary anti-DLL3 trispecific proteins were able to decrease the viability of the DMS-153 cells. FIG. 2 shows results of the TDCC assay for anti-DLL3 trispecific proteins comprising DLL3 binding domains DH18 (SEQ ID NO: 59), DH11 (SEQ ID NO: 55), DH67 (SEQ ID NO: 42), and DH56 (SEQ ID NO: 73). FIG. 3 shows results of the TDCC assay for anti-DLL3 trispecific proteins comprising DLL3 binding domains DH2 (SEQ ID NO: 60), DH43 (SEQ ID NO: 68), DH10 (SEQ ID NO: 54), and DH6 (SEQ ID NO: 75). FIG. 4 shows results of the TDCC assay for DLL3 trispecific protein comprises DLL3 binding domains DH82 (SEQ ID NO: 81), DH23 (SEQ ID NO: 62), DH89 (SEQ ID NO: 84), and DH17 (SEQ ID NO: 58). FIG. 5 shows results of the TDCC assay for DLL3 trispecific protein comprises DLL3 binding domains DH83 (SEQ ID NO: 82), DH12 (SEQ ID NO: 56), DH61 (SEQ ID NO: 76), and DH29 (SEQ ID NO: 64). FIG. 6 shows results of the TDCC assay for DLL3 trispecific protein comprises DLL3 binding domains DH58 (SEQ ID NO: 74) and DH70 (SEQ ID NO: 79). A negative control for the TDCC assays was a trispecific protein targeting GFP instead of DLL3 (as shown in FIG. 6) which did not direct the T cells to kills the DMS-153 cells. EC₅₀ values from the TDCC assay are also listed in Table 1. These values ranged from 69 μM to 11 nM.

TABLE 1
Activity of Humanized Anti-DLL3 Trispecific Proteins in DMS-153
TDCC Assays and Their Affinities for Human and Cynomolgus DLL3
Protein. The KD measurements were made using a single concentration
of anti-DLL3 trispecific protein. The TDCC assay was performed
using human T cells. n/d indicates binding was not detected.

| DLL3 binder | DMS-153 TDCC EC50 (M) | huDLL3 KD (nM) | cyDLL3 KD (nM) |
|---|---|---|---|
| DH43 | 6.9E−11 | 4.3 | 5.5 |
| DH12 | 7.8E−11 | 1.3 | n/d |
| DH11 | 9.3E−11 | 5.3 | 5.6 |
| DH58 | 1.1E−10 | 3.3 | 27.9 |
| DH6 | 1.2E−10 | 6.1 | 6.8 |
| DH83 | 1.5E−10 | 4.7 | n/d |
| DH10 | 1.6E−10 | 3.9 | 25.0 |
| DH17 | 1.6E−10 | 7.0 | n/d |
| DH67 | 2.0E−10 | 8.4 | 8.2 |
| DH2 | 2.6E−10 | 6.5 | 14.6 |
| DH56 | 3.4E−10 | 8.1 | 8.0 |
| DH70 | 3.4E−10 | 16.2 | 86.2 |
| DH61 | 3.8E−10 | 10.6 | 30.8 |
| DH89 | 4.0E−10 | 6.9 | n/d |
| DH23 | 4.0E−10 | 9.9 | n/d |
| DH29 | 4.2E−10 | 5.6 | n/d |
| DH5 | 5.2E−10 | 0.5 | 5.5 |
| DH18 | 6.4E−10 | 1.0 | 5.9 |
| DH45 | 6.9E−10 | 1.9 | 2.8 |
| DH82 | 8.4E−10 | 6.6 | n/d |
| DH80 | 1.0E−09 | 0.8 | 5.5 |
| DH27 | 1.2E−09 | 2.1 | 11.3 |
| DH69 | 1.4E−09 | 1.2 | 7.0 |
| DH92 | 1.7E−09 | 18.0 | 17.5 |
| DH94 | 1.8E−09 | 2.6 | 9.6 |
| DH42 | 1.8E−09 | 4.3 | 11.7 |
| DH1 | 2.0E−09 | 3.5 | 10.7 |
| DH38 | 2.9E−09 | 11.9 | n/d |
| DH51 | 3.8E−09 | 5.1 | 18.2 |
| DH54 | 4.5E−09 | 20.6 | 42.4 |
| DH3 | 6.2E−09 | 41.9 | n/d |
| DH15 | 2.0E−08 | 17.4 | n/d |
| DH22 | 2.8E−08 | 6.8 | 16.4 |
| DH84 | 1.1E−08 | 15.2 | 17.9 |

### Example 3: Screening of Phage Display Library for Identification of DLL3 Binding Domains with Higher Binding Affinities, Using Two Humanized DLL3 Single Domain Antibodies from Previous Example

[0232] Two of the humanized antibody sequences, DH43 (SEQ ID NO: 68) and DH6 (SEQ ID NO: 75), were used as a starting point for making phage display libraries (following a method as described in WO2016187101A2). The anti-DLL3 sequences from this panning were subsequently cloned into an expression vector, in an expression construct comprising a signal domain followed by an anti-DLL3 heavy chain only variable domain followed by a GGGGSGGGS linker (SEQ ID NO: 1808) followed by an anti-human albumin single domain antibody domain followed by a GGGGSGGGS linker (SEQ ID NO: 1808) followed by an anti-human CD3 antibody fragment followed by a HHHHHH tag (SEQ ID NO: 1819), to generate anti-DLL3 trispecific proteins. These constructs were transfected into EXPI293™ cells, and the expressed anti-DLL3 trispecific proteins were quantitated as described in Example 2. The sequences of the clones identified from the panning are SEQ ID NOS: 87 to 367. Table 2 provides CDR variations obtained in the DH43 DLL3 binder sequences after phage display selection. Three of the clones identified from the panning, SEQ ID NOS: 199 (2E05), 330 (4D09), and 365 (4H011) were engineered to generate variants, where each variant had a single amino acid change from the parental sequence, for example, to remove potential metabolic liabilities of the parental sequence. In particular, the DLL3 binding domains comprising SEQ ID NOS: 227 (2E05-M106Y), 228 (2E05-M106Q) were engineered variants of SEQ ID NO: 199 (2E05); SEQ ID NO: 366 (4D09-M34L) was an engineered variant of SEQ ID NO: 330 (4D09); and SEQ ID NO: 367 (4H11-M34L) was an engineered variant of SEQ ID NO: 365 (4H011). The CDR1 sequences of these DLL3 binding clones identified by the panning are SEQ ID NOS: 529 to 809, the CDR2 sequences of the clones identified by the panning are SEQ ID NOS: 971 to 1251, and the CDR3 sequences of the clones identified by the panning are SEQ ID NOS: 1413 to 1691.

TABLE 2
Variants in CDR sequences by amino acid
position of DH43 and its derivatives

| | Amino acid | |
|---|---|---|
| CDR | position | CDR Amino acid Variants |
| CDR1 | 26 | G |
| | 27 | A, E, F, G, I, K, L, N, Q, R, S, T, V, Y |
| | 28 | A, G, I, K, P, R, S, T, V |
| | 29 | A, D, F, K, L, N, P, Q, R, S, T, Y |
| | 30 | A, D, F, H, I, K, L, M, N, P, R, S, T, V, Y |
| | 31 | F, I, K, L, M, N, R, S, T, V |
| | 32 | N |
| | 33 | A, G |
| | 34 | F, I, L, M, T, V, Y |
| | 35 | A, G |
| | 36 | W |
| CDR2 | 50 | G |
| | 51 | I, V |
| | 52 | S |
| | 53 | A, K, P, R, S |
| | 54 | D, N |
| | 55 | D, E, G, K, N, Q, R, S, T, Y |
| | 56 | S, T |
| | 57 | A, E, F, H, I, K, L, N, Q, R, S, T, V, Y |
| | 58 | A, I, L, M, V, Y |
| | 59 | D, F, H, I, L, N, S, T, V, Y |
| | 60 | A, D, E, F, G, I, K, L, N, Q, R, S, T, V, Y |
| | 61 | A, D, E, G, K, Q, S, V |
| | 62 | S |
| | 63 | A, V |
| | 64 | K |
| | 65 | G, V |
| CDR3 | 98 | F, Y |
| | 99 | G, H, I, K, N, R, S, T |
| | 100 | A, F, H, I, K, L, M, N, P, Q, R, S, T, Y |
| | 101 | A, E, F, G, H, I, K, L, M, N, Q, R, S, T, V, Y |
| | 102 | A, C, D, E, G, H, I, K, L, N, P, Q, R, S, T, W, Y |
| | 103 | G, K, L, R, T |
| | 104 | A, G, H, L, Q, R, S, T, V, Y |
| | 105 | A, D, E, G, H, P, Q, S, T, W, Y |
| | 106 | A, G, I, K, L, M, N, Q, R, S, T, V, Y |
| | 107 | A, G, K, P, R, S, T, V |
| | 108 | A, F, S, Y |

[0233] Using the conditioned medium with known concentrations of the anti-DLL3 trispecific proteins, the binding affinities of the anti-DLL3 trispecific proteins toward human DLL3 protein were measured using a method where biotinylated version of human DLL3 protein were expressed as a human IgG1 fusion protein, and the binding affinity measurement was carried out in an Octet instrument with streptavidin tips. The KD measurements were made using a single 50 nM concentration of the anti-DLL3 trispecific proteins, which allowed for rank ordering potency. In this experiment, the relative K_{D} values of the affinity matured clones ranged from 2.3 nM to 64 nM, as listed in Table 3. The parental binders DH43 and DH6, respectively, had K_{D} values of 7.7±0.6 nM and 9.9±0.3 nM based on four samples of conditioned medium from four transfections.

[0234] For select DLL3 binder molecules identified in this round of panning, as well as for the parental DLL3 binders DH43 and DH6, more precise affinity measurements for human DLL3 were made using 60 nM, 20 nM, 6.67 nM, and 2.22 nM concentrations of the anti-DLL3 trispecific proteins. In addition, relative affinity measurements were made using only 60 nM of the anti-DLL3 trispecific proteins. Binding affinities determined from the more precise measurements of certain anti-DLL3 binding molecules are listed in Table 4 [1H012 (SEQ ID NO: 162); 1A011 (SEQ ID NO: 95); 2E05 (SEQ ID NO: 199); 4H011 (SEQ ID NO: 365); 3C04 (SEQ ID NO: 251); 2E02 (SEQ ID NO: 198); 2H02 (SEQ ID NO: 221); 3A011(SEQ ID NO: 238); 3A02 (SEQ ID NO: 230); 4D09 (SEQ ID NO: 330); DH43 (SEQ ID NO: 68); and DH6(SEQ ID NO: 75)]. In this study, the parental binder, DH43, had a K_{D} value of 8.9 nM, whereas the highest affinity daughter molecule, 1H012 (SEQ ID NO: 162), had an affinity of 2.9 nM. Furthermore, 1H012 (SEQ ID NO: 162) retained an ability to bind to cynomolgus DLL3 as well. Also in this study, the parental binder, DH6, had a K_{D} value of 9.0 nM, whereas the highest affinity daughter molecule, 4H011 (SEQ ID NO: 365), had an affinity of 3.9 nM. Furthermore, 4H011(SEQ ID NO: 365) retained an ability to bind to cynomolgus DLL3 as well.

[0235] Twenty-two DLL3 binder molecules identified in this round of panning were selected for testing in a TDCC assay with DMS-153 cells, using the same protocol as described in Example 2. Exemplary TDCC data are plot as graphs in FIGS. 7-11, and a summary of the EC₅₀ values are listed in Table 5. In this experiment, the parental DLL3 molecules, DH43 and DH6, had EC₅₀ values of 200 nM and 340 nM, respectively. The most potent daughter molecule of DH43 was 1H012 (SEQ ID NO: 162), with an EC₅₀ value of 28 nM, demonstrating greater than 7-fold increase in TDCC potency compared to the parental DLL3 binder DH43. The most potent daughter molecule of DH6 was 4H011 (SEQ ID NO: 365) with an EC₅₀ value of 36 nM, thereby showing greater than 8-fold increase in TDCC potency, compared to the parental DLL3 binder molecule. A control trispecific protein targeting GFP, used as a control, had no activity in this assay (as shown in FIG. 11).

TABLE 3
Relative Affinities of Anti-DLL3 Trispecific Proteins

| Name | K_{D}(M) |
|---|---|
| 4A010 | 2.3E−09 |
| 2E011 | 2.4E−09 |
| 1C010 | 2.5E−09 |
| 3H011 | 2.7E−09 |
| 1E011 | 2.7E−09 |
| 1H012 | 3.5E−09 |
| 4G01 | 3.6E−09 |
| 1A011 | 3.7E−09 |
| 4D01 | 3.7E−09 |
| 4E02 | 3.8E−09 |
| 2E05 | 3.9E−09 |
| 4B011 | 3.9E−09 |
| 1F02 | 4.0E−09 |
| 1A05 | 4.0E−09 |
| 2A011 | 4.0E−09 |
| 2E010 | 4.0E−09 |
| 2C02 | 4.1E−09 |
| 2E01 | 4.1E−09 |
| 2G08 | 4.1E−09 |
| 1C01 | 4.3E−09 |
| 4B07 | 4.3E−09 |
| 1E09 | 4.4E−09 |
| 2H02 | 4.4E−09 |
| 3F010 | 4.4E−09 |
| 1D011 | 4.4E−09 |
| 3C04 | 4.5E−09 |
| 4H011 | 4.5E−09 |
| 4D09 | 4.7E−09 |
| 1A012 | 4.9E−09 |
| 2D012 | 4.9E−09 |
| 3C03 | 4.9E−09 |
| 1F011 | 5.0E−09 |
| 2H011 | 5.0E−09 |
| 1D010 | 5.0E−09 |
| 4C01 | 5.1E−09 |
| 1B01 | 5.2E−09 |
| 1D09 | 5.2E−09 |
| 1E012 | 5.3E−09 |
| 3D011 | 5.3E−09 |
| 1C05 | 5.3E−09 |
| 2H03 | 5.3E−09 |
| 1B09 | 5.4E−09 |
| 4B09 | 5.4E−09 |
| 2D011 | 5.4E−09 |
| 2A04 | 5.6E−09 |
| 1A06 | 5.6E−09 |
| 4A011 | 5.6E−09 |
| 2G03 | 5.6E−09 |
| 2B07 | 5.7E−09 |
| 1B011 | 5.7E−09 |
| 1H01 | 5.7E−09 |
| 1E010 | 5.7E−09 |
| 4F010 | 5.8E−09 |
| 1D01 | 5.8E−09 |
| 1F05 | 5.8E−09 |
| 1D03 | 5.8E−09 |
| 4D011 | 5.8E−09 |
| 1F012 | 5.8E−09 |
| 3C08 | 5.9E−09 |
| 2F03 | 5.9E−09 |
| 4D08 | 5.9E−09 |
| 3D07 | 5.9E−09 |
| 2D07 | 6.0E−09 |
| 2E02 | 6.0E−09 |
| 4C011 | 6.0E−09 |
| 2C08 | 6.1E−09 |
| 1C03 | 6.1E−09 |
| 2H07 | 6.1E−09 |
| 4H04 | 6.1E−09 |
| 1C02 | 6.2E−09 |
| 2C07 | 6.2E−09 |
| 1H011 | 6.2E−09 |
| 1H07 | 6.2E−09 |
| 2D04 | 6.2E−09 |
| 3A09 | 6.3E−09 |
| 2H04 | 6.3E−09 |
| 1F010 | 6.3E−09 |
| 1A03 | 6.3E−09 |
| 2C09 | 6.4E−09 |
| 2H010 | 6.4E−09 |
| 4D05 | 6.5E−09 |
| 2G07 | 6.5E−09 |
| 1A010 | 6.5E−09 |
| 2F09 | 6.5E−09 |
| 2B02 | 6.6E−09 |
| 4C03 | 6.6E−09 |
| 1A09 | 6.6E−09 |
| 2D06 | 6.6E−09 |
| 1G01 | 6.6E−09 |
| 2C06 | 6.7E−09 |
| 4C02 | 6.8E−09 |
| 2C04 | 6.8E−09 |
| 3A011 | 6.8E−09 |
| 1G011 | 6.8E−09 |
| 4C06 | 6.8E−09 |
| 2D03 | 6.8E−09 |
| 1B010 | 6.8E−09 |
| 1D06 | 6.8E−09 |
| 3G010 | 6.9E−09 |
| 4C010 | 7.0E−09 |
| 1E02 | 7.0E−09 |
| 1A01 | 7.0E−09 |
| 4B02 | 7.1E−09 |
| 1C07 | 7.1E−09 |
| 3F011 | 7.1E−09 |
| 1E07 | 7.1E−09 |
| 4E08 | 7.2E−09 |
| 3B05 | 7.2E−09 |
| 2B012 | 7.3E−09 |
| 3G09 | 7.3E−09 |
| 3B07 | 7.3E−09 |
| 2D010 | 7.3E−09 |
| 2B05 | 7.4E−09 |
| 4D06 | 7.5E−09 |
| 4G011 | 7.5E−09 |
| 4C07 | 7.5E−09 |
| 3F05 | 7.5E−09 |
| 2C010 | 7.6E−09 |
| 2B03 | 7.6E−09 |
| 4G08 | 7.6E−09 |
| 1C011 | 7.6E−09 |
| 2A08 | 7.7E−09 |
| 1A04 | 7.8E−09 |
| 3C09 | 7.8E−09 |
| 2H06 | 7.9E−09 |
| 2G09 | 8.0E−09 |
| 2F07 | 8.0E−09 |
| 1B05 | 8.0E−09 |
| 2A01 | 8.0E−09 |
| 3H06 | 8.0E−09 |
| 1E04 | 8.1E−09 |
| 1C04 | 8.1E−09 |
| 3A02 | 8.1E−09 |
| 2A03 | 8.2E−09 |
| 3G01 | 8.2E−09 |
| 4F011 | 8.2E−09 |
| 2D09 | 8.2E−09 |
| 3C05 | 8.2E−09 |
| 4C05 | 8.3E−09 |
| 1C06 | 8.3E−09 |
| 2D05 | 8.3E−09 |
| 1G07 | 8.3E−09 |
| 1H010 | 8.4E−09 |
| 2E09 | 8.5E−09 |
| 1C012 | 8.5E−09 |
| 1A07 | 8.6E−09 |
| 3H010 | 8.6E−09 |
| 4D04 | 8.6E−09 |
| 1B03 | 8.7E−09 |
| 4F09 | 8.8E−09 |
| 4G09 | 8.8E−09 |
| 3G04 | 8.8E−09 |
| 2A05 | 8.9E−09 |
| 2A06 | 8.9E−09 |
| 1F06 | 8.9E−09 |
| 1B07 | 8.9E−09 |
| 4H08 | 8.9E−09 |
| 4A02 | 9.0E−09 |
| 4F08 | 9.0E−09 |
| 4E010 | 9.0E−09 |
| 3H01 | 9.0E−09 |
| 3B011 | 9.0E−09 |
| 4A09 | 9.0E−09 |
| 4E09 | 9.1E−09 |
| 3C02 | 9.1E−09 |
| 2F01 | 9.2E−09 |
| 3A04 | 9.2E−09 |
| 1D012 | 9.3E−09 |
| 1E08 | 9.4E−09 |
| 4A05 | 9.4E−09 |
| 1F01 | 9.4E−09 |
| 2F02 | 9.6E−09 |
| 1D04 | 9.7E−09 |
| 4G05 | 9.7E−09 |
| 4F04 | 9.8E−09 |
| 4A07 | 9.8E−09 |
| 4G010 | 9.9E−09 |
| 4D010 | 9.9E−09 |
| 3H03 | 9.9E−09 |
| 3F06 | 9.9E−09 |
| 1D08 | 1.0E−08 |
| 2B010 | 1.0E−08 |
| 3B01 | 1.0E−08 |
| 3D01 | 1.0E−08 |
| 4A01 | 1.0E−08 |
| 2B01 | 1.0E−08 |
| 3C06 | 1.0E−08 |
| 1H02 | 1.0E−08 |
| 1G09 | 1.0E−08 |
| 4E06 | 1.0E−08 |
| 2F06 | 1.0E−08 |
| 2A09 | 1.0E−08 |
| 3E09 | 1.0E−08 |
| 1F04 | 1.0E−08 |
| 4B08 | 1.0E−08 |
| 2G04 | 1.1E−08 |
| 4B01 | 1.1E−08 |
| 1B02 | 1.1E−08 |
| 1B04 | 1.1E−08 |
| 2E06 | 1.1E−08 |
| 3E011 | 1.1E−08 |
| 4E01 | 1.1E−08 |
| 3D03 | 1.1E−08 |
| 4E07 | 1.1E−08 |
| 1G04 | 1.1E−08 |
| 3E04 | 1.1E−08 |
| 2B011 | 1.1E−08 |
| 3E02 | 1.2E−08 |
| 3D02 | 1.2E−08 |
| 3A010 | 1.2E−08 |
| 2C01 | 1.2E−08 |
| 3G06 | 1.2E−08 |
| 3B010 | 1.2E−08 |
| 3A03 | 1.2E−08 |
| 3F09 | 1.2E−08 |
| 4B04 | 1.2E−08 |
| 3G08 | 1.2E−08 |
| 3A08 | 1.2E−08 |
| 3B02 | 1.2E−08 |
| 4F03 | 1.2E−08 |
| 1B08 | 1.2E−08 |
| 2G011 | 1.3E−08 |
| 3G07 | 1.3E−08 |
| 4E011 | 1.3E−08 |
| 3H07 | 1.3E−08 |
| 1F07 | 1.3E−08 |
| 4H03 | 1.3E−08 |
| 4A06 | 1.3E−08 |
| 3F03 | 1.3E−08 |
| 3C011 | 1.4E−08 |
| 1D02 | 1.4E−08 |
| 1H06 | 1.4E−08 |
| 2D02 | 1.4E−08 |
| 1E05 | 1.4E−08 |
| 1G05 | 1.4E−08 |
| 3D010 | 1.4E−08 |
| 3F08 | 1.4E−08 |
| 3H09 | 1.4E−08 |
| 3C01 | 1.4E−08 |
| 3A05 | 1.5E−08 |
| 4F02 | 1.5E−08 |
| 4G02 | 1.5E−08 |
| 3B06 | 1.5E−08 |
| 4C08 | 1.6E−08 |
| 3A06 | 1.6E−08 |
| 3D05 | 1.6E−08 |
| 4H09 | 1.6E−08 |
| 4H07 | 1.6E−08 |
| 3A01 | 1.6E−08 |
| 3E01 | 1.6E−08 |
| 4B06 | 1.6E−08 |
| 1H08 | 1.7E−08 |
| 3G011 | 1.7E−08 |
| 3D08 | 1.7E−08 |
| 2E08 | 1.7E−08 |
| 4H06 | 1.8E−08 |
| 2H08 | 1.8E−08 |
| 4B05 | 1.8E−08 |
| 4G07 | 1.8E−08 |
| 3G02 | 2.0E−08 |
| 3E03 | 2.0E−08 |
| 2F08 | 2.0E−08 |
| 4G03 | 2.0E−08 |
| 3B09 | 2.0E−08 |
| 4H01 | 2.1E−08 |
| 3B04 | 2.4E−08 |
| 4A08 | 2.4E−08 |
| 1C08 | 2.5E−08 |
| 4D03 | 2.6E−08 |
| 1G06 | 2.6E−08 |
| 4D02 | 3.0E−08 |
| 1F08 | 3.1E−08 |
| 3D09 | 3.2E−08 |
| 4A04 | 3.5E−08 |
| 1F09 | 3.5E−08 |
| 4H05 | 6.4E−08 |

TABLE 4
Binding constants for human DLL3 determined using three different
concentrations of anti-DLL3 Trispecific proteins and binding
constants for cynomolgus DLL3 determine using a single concentration
of anti-DLL3 Trispecific proteins

| | Human K_{D} | Cynomolgus K_{D} |
|---|---|---|
| Name | (nM) | (nM) |
| 1H012 | 2.9 | 4.3 |
| 1A011 | 3.5 | 3.6 |
| 2E05 | 3.5 | 4.8 |
| 4H011 | 3.9 | 5.7 |
| 3C04 | 4.0 | 5.7 |
| 2E02 | 4.4 | 3.4 |
| 2H02 | 4.4 | 5.2 |
| 3A011 | 7.3 | 8.8 |
| 3A02 | 7.8 | 9.5 |
| 4D09 | 8.1 | 8.2 |
| DH43 | 8.9 | 8.5 |
| DH6 | 9.0 | 10 |

TABLE 5
DMS-153 TDCC values of affinity matured anti-
DLL3 Trispecific protein in conditioned medium
tested in triplicate using human T cells

| Name | EC₅₀ (M) |
|---|---|
| 1H012 | 2.8E−11 |
| 2H02 | 3.1E−11 |
| 2E010 | 3.1E−11 |
| 2E05 | 3.3E−11 |
| 2E01 | 3.3E−11 |
| 4H011 | 3.6E−11 |
| 4E02 | 4.1E−11 |
| 4B011 | 4.8E−11 |
| 2F11 | 4.9E−11 |
| 4H04 | 5.1E−11 |
| 1A011 | 5.1E−11 |
| 4D09 | 5.2E−11 |
| 3C04 | 5.2E−11 |
| 2E02 | 5.9E−11 |
| 3D07 | 6.1E−11 |
| 4B07 | 6.7E−11 |
| 4C06 | 6.8E−11 |
| 2A04 | 8.1E−11 |
| 1C03 | 9.6E−11 |
| 3H06 | 1.2E−10 |
| 3H011 | 1.2E−10 |
| 2E011 | 1.9E−10 |
| DH43 | 2.0E−10 |
| DH6 | 3.4E−10 |

### Example 4: Cloning of Select DLL3 Binding Molecules from Example 3 into Mammalian Cells

[0236] Anti-DLL3 trispecific proteins described in Example 3, as well as the parental DLL3 binder molecules were subcloned into a CHO cell expression vector and were stably transfected in CHO cells (see, Running Deer and Allison 2004. Biotechnol. Prog. 20: 880-889). The DLL3 binder molecules were: 2E05-M106Q (SEQ ID NO: 228); 2C04 (SEQ ID NO: 181); 4D09-M34L(SEQ ID NO: 366); 4D09 (SEQ ID NO: 330); 2E05-M106Y (SEQ ID NO: 227); 1H012 (SEQ ID No. 162) (also referred to herein as 1H12); 2E05 (SEQ ID NO: 199); 2H02 (SEQ ID NO: 221); 4D011 (SEQ ID NO: 332) (also referred to herein as 4D11); 2E02 (SEQ ID NO: 198); 4H11-M34L (SEQ ID NO: 367); 1A011 (SEQ ID NO: 95) (also referred to herein as 1A11); DH6 (SEQ ID NO: 75); and DH43 (SEQ ID NO: 68). The anti-DLL3 trispecific proteins were purified after expression in CHO cells, in conditioned medium from pools of stable clones, using protein A and ion exchange chromatography. The purified proteins were tested in TDCC assay using the same method as described in Example 2. The EC₅₀ values from the TDCC assay of the instant example are listed in Table 6, and the graphs of the data are in FIGS. 12-15. The most potent molecule, 2E05-M106Q (SEQ ID NO: 228), had an EC₅₀ value of 41 nM, which is 6.6-fold more potent than the parental molecule, DH43. The most potent molecule derived from DH6 was 4D09-M34L (SEQ ID NO: 366), which had an EC₅₀ value of 54 nM and is 4.4-fold more potent than the parental molecule, DH6.

TABLE 6
TDCC Activity of CHO Expressed and Purified Affinity
Matured Anti-DLL3 Trispecific Proteins

| Name | EC₅₀ (M) |
|---|---|
| 2E05-M106Q | 4.10E−11 |
| 2C04 | 4.30E−11 |
| 4D09-M34L | 5.40E−11 |
| 4D09 | 6.00E−11 |
| 2E05-M106Y | 6.30E−11 |
| 1H12 | 6.30E−11 |
| 2E05 | 7.20E−11 |
| 2H02 | 9.60E−11 |
| 4D11 | 9.80E−11 |
| 2E02 | 1.20E−10 |
| 4H11-M34L | 1.30E−10 |
| 1A11 | 1.70E−10 |
| DH6 | 2.40E−10 |
| DH43 | 2.70E−10 |

### Example 5: Affinity Maturation to Obtain Anti-DLL3 Binders of Improved Affinity

[0237] To obtain more potent anti-DLL3 binders, a second round of affinity maturation was performed. Phage display libraries were created based on the DH6 (SEQ ID NO: 75) and DH58 (SEQ ID NO: 74) parental sequences. The sequences for the binders from this round of affinity maturation are provided in SEQ ID NOS: 368 to 442. The CDR1 sequences of DLL3 binders identified in this round of affinity maturation are SEQ ID NOS: 810 to 884, the CDR2 sequences of DLL3 binders identified in this round of affinity maturation are SEQ ID NOS: 1252 to 1326, and the CDR3 sequences of DLL3 binders identified in this round of affinity maturation are SEQ ID NOS: 1692 to 1768. Table 7 provides CDR variations obtained in the DH6 DLL3 binder sequences after phage display selection.

[0238] The affinity matured anti-DLL3 sequences identified as above were cloned into an expression vector, in an expression construct comprising a signal domain followed by an anti-DLL3 sequence followed by a GGGGSGGGS linker (SEQ ID NO: 1808) followed by anti-human albumin single domain antibody TOG (SEQ ID NO: 1774) followed by a GGGGSGGGS linker (SEQ ID NO: 1808) followed by anti-human CD3 antibody 2B2 (SEQ ID No. 1793) followed by a HHHHHH tag (SEQ ID NO: 1819), to generate anti-DLL3 trispecific constructs.

[0239] The anti-DLL3 trispecific constructs containing the affinity matured anti-DLL3 binding sequences were then transfected into EXPI293™ cells. These anti-DLL3 trispecific constructs were subsequently engineered with a protein A binding site, and the amount of anti-DLL3 trispecific construct in the conditioned media from the transfected EXPI293™ cells was quantitated using an Octet instrument with protein A tips. A control trispecific protein of similar molecular weight as the anti-DLL3 trispecific proteins was used as a standard.

[0240] Using the conditioned medium with known concentrations of the anti-DLL3 trispecific proteins, the relative binding affinities of the anti-DLL3 trispecific proteins toward human DLL3 protein were measured using a method where biotinylated version of human DLL3 protein were expressed as a human IgG1 fusion protein, and the binding affinity measurement was carried out in an Octet instrument with streptavidin tips. The K_{D} measurements were made using a single 50 nM concentration of anti-DLL3 trispecific protein, which allowed for rank ordering potency. The measured affinities are listed in Table 8. All of the tested sequences were found to bind human DLL3, with KD values ranging from 0.3 nM to 34 nM.

[0241] The conditioned medium was also tested in a T-cell dependent cellular cytotoxicity assay (see, Nazarian A A, Archibeque I L, Nguyen Y H, Wang P, Sinclair A M, Powers D A. 2015. J Biomol Screen. 20:519-27). In this assay, luciferase labelled DMS-153 cells were combined with purified human T cells and a titration of anti-DLL3 trispecific proteins. It was hypothesized that if an anti-DLL3 trispecific protein directed T cells to kill the DLL3-expression DMS-153 cells, then the viability of the DMS-153 cells, as determined by running a luciferase assay at 48 hours after starting the experiment, should decrease. FIG. 16 illustrates a graph of representative TDCC data for anti-DLL3 trispecific proteins containing the following DLL3 binding domains: 51A02 (SEQ ID NO: 409), 51G02 (SEQ ID NO: 425), 52B01 (SEQ ID NO: 430), 52C04 (SEQ ID No. 431), 51A05 (SEQ ID NO: 411), 52D04 (SEQ ID NO: 432), 51E05 (SEQ ID NO: 420), 51H05 (SEQ ID NO: 429), and for purified DH43 protein (SEQ ID NO: 68), and purified DH6 protein (SEQ ID NO: 75). EC₅₀ values from the TDCC assay are listed in Table 9. The values ranged from 4.2 μM to 1.5 nM. A negative control for the TDCC assays was a trispecific protein targeting GFP (as shown in FIG. 16) which did not direct the T cells to kills the DMS-153 cells.

TABLE 7
Variants in CDR sequences by amino acid position of DH6 and its derivatives

| CDR | Amino acid position | CDR Amino acids |
|---|---|---|
| CDR1 | 26 | A, D, E, F, G, H, K, L, M, N, Q, R, S, V, W, Y |
| | 27 | D, E, H, K, M, P, R, S, T, Y |
| | 28 | A, D, G, H, K, N, P, Q, R, S, T, V, Y |
| | 29 | K, S, V |
| | 30 | A, F, G, H, K, L, M, N, Q, R, S, T, V, W, Y |
| | 31 | D, F, H, I, K, L, M, N, Q, R, S, V, Y |
| | 32 | L, M |
| | 33 | S |
| | 34 | I, L, M, S, T, V |
| | 35 | A |
| CDR2 | 50 | G |
| | 51 | I, V |
| | 52 | S |
| | 53 | A, D, E, G, H, I, K, L, N, P, Q, R, S, T, V, Y |
| | 54 | A, D, E, G, H, N, R, T |
| | 55 | G |
| | 56 | H, P, R, S |
| | 57 | A, H, I, K, M, N, Q, R, T, V |
| | 58 | A, D, G, H, I, L, M, N, S, T, V, Y |
| | 59 | Y |
| | 60 | A, F, I, L, M, R, S, T, V, Y |
| | 61 | A, D, E, G, H, K, L, N, R, S, V |
| | 62 | S |
| | 63 | V |
| | 64 | K |
| | 65 | G |
| CDR3 | 98 | L, Y |
| | 99 | D, E, G, H, K, N, Q, R, S, T, V, Y |
| | 100 | Q, W |
| | 101 | A, D, E, G, H, I, K, L, M, P, R, S, T, V |
| | 102 | A, D, E, G, N, R, S, T, Y |
| | 103 | A, P, R, S |
| | 104 | A, D, F, G, H, L, M, N, Q, R, S, T, V, Y |
| | 105 | A, G, I, K, P, Q, R, S, T |
| | 106 | F, H, Y |

TABLE 8
Binding constants for human DLL3 determined using a single
concentration of anti-DLL3 Trispecific proteins

| Name | K_{D} (nM) |
|---|---|
| 53A05 | 3.1E−10 |
| 53A04 | 4.2E−10 |
| 53C04 | 5.0E−10 |
| 52D04 | 5.0E−10 |
| 53B05 | 6.0E−10 |
| 51G10 | 6.0E−10 |
| 52B01 | 6.1E−10 |
| 51H05 | 6.7E−10 |
| 53B06 | 7.1E−10 |
| 54B05 | 7.6E−10 |
| 52C04 | 8.2E−10 |
| 42C03 | 8.8E−10 |
| 51A01 | 9.2E−10 |
| 51E05 | 9.7E−10 |
| 53A09 | 9.7E−10 |
| 51H04 | 1.0E−09 |
| 42A06 | 1.0E−09 |
| 41H03 | 1.0E−09 |
| 51A05 | 1.1E−09 |
| 42E05 | 1.2E−09 |
| 51A02 | 1.2E−09 |
| 42D08 | 1.3E−09 |
| 51G02 | 1.3E−09 |
| 42B10 | 1.3E−09 |
| 42G07 | 1.3E−09 |
| 41D01 | 1.4E−09 |
| 51F03 | 1.4E−09 |
| 42D06 | 1.5E−09 |
| 41H04 | 1.5E−09 |
| 51B01 | 1.6E−09 |
| 42C08 | 1.8E−09 |
| 42A03 | 1.9E−09 |
| 42A11 | 2.0E−09 |
| 42H08 | 2.1E−09 |
| 51A03 | 2.2E−09 |
| 42C11 | 2.3E−09 |
| 41C02 | 2.4E−09 |
| 51B11 | 2.4E−09 |
| 51F02 | 2.4E−09 |
| 42H05 | 2.7E−09 |
| 41D02 | 2.7E−09 |
| 42D05 | 2.7E−09 |
| 42E02 | 2.9E−09 |
| 42H11 | 3.1E−09 |
| 42A07 | 3.2E−09 |
| 42C10 | 3.2E−09 |
| 42B06 | 3.2E−09 |
| 42F08 | 3.2E−09 |
| 51D03 | 3.3E−09 |
| 41E02 | 3.4E−09 |
| 42G05 | 3.4E−09 |
| 51E02 | 3.5E−09 |
| 42C01 | 3.6E−09 |
| 42A08 | 3.6E−09 |
| 42E06 | 3.8E−09 |
| 42E07 | 3.9E−09 |
| 41G01 | 4.0E−09 |
| 42E01 | 4.0E−09 |
| 41D03 | 4.8E−09 |
| 41E01 | 5.3E−09 |
| 42D07 | 5.3E−09 |
| 42F01 | 5.5E−09 |
| 42C07 | 6.4E−09 |
| 51F04 | 6.7E−09 |
| 51E03 | 7.2E−09 |
| 51C02 | 7.5E−09 |
| 51D01 | 7.9E−09 |
| 41B11 | 9.9E−09 |
| 51B04 | 1.6E−08 |
| 51F01 | 1.6E−08 |
| 42F10 | 1.7E−08 |
| 51G04 | 2.1E−08 |
| 41F07 | 2.5E−08 |
| 41D07 | 3.4E−08 |

TABLE 9
DMS-153 TDCC values of affinity matured anti-
DLL3 Trispecific Proteins in conditioned medium
tested in triplicate using human T cells

| Name | TDCC EC₅₀ (M) |
|---|---|
| 52D04 | 4.2E−12 |
| 51H05 | 5.3E−12 |
| 52B01 | 5.5E−12 |
| 54B05 | 6.2E−12 |
| 53C04 | 6.2E−12 |
| 51G10 | 6.6E−12 |
| 51G02 | 6.8E−12 |
| 53B06 | 7.7E−12 |
| 52C04 | 8.2E−12 |
| 53A04 | 8.2E−12 |
| 51A02 | 9.5E−12 |
| 51A05 | 9.6E−12 |
| 53A09 | 9.7E−12 |
| 51E05 | 1.1E−11 |
| 51F03 | 1.1E−11 |
| 51H04 | 1.2E−11 |
| 53B05 | 1.2E−11 |
| 53H04 | 1.3E−11 |
| 53A05 | 1.6E−11 |
| 51B01 | 1.8E−11 |
| 42D08 | 1.9E−11 |
| 51A01 | 1.9E−11 |
| 41E02 | 2.1E−11 |
| 41D01 | 2.3E−11 |
| 42C03 | 2.5E−11 |
| 42A03 | 2.5E−11 |
| 42F10 | 2.5E−11 |
| 51B11 | 2.7E−11 |
| 42A07 | 2.8E−11 |
| 42G07 | 2.8E−11 |
| 42A06 | 2.8E−11 |
| 42F08 | 3.1E−11 |
| 42E05 | 3.4E−11 |
| 42C01 | 3.5E−11 |
| 42D05 | 3.6E−11 |
| 41C02 | 3.6E−11 |
| 51D03 | 3.8E−11 |
| 42H05 | 3.8E−11 |
| 51E02 | 3.8E−11 |
| 42C10 | 3.9E−11 |
| 42D06 | 4.0E−11 |
| 42H08 | 4.0E−11 |
| 42A11 | 4.2E−11 |
| 41D02 | 4.4E−11 |
| 42A08 | 4.5E−11 |
| 42E02 | 4.7E−11 |
| 41D03 | 4.8E−11 |
| 41G01 | 5.0E−11 |
| 42C11 | 5.3E−11 |
| 51A03 | 5.4E−11 |
| 42G05 | 5.9E−11 |
| 42B10 | 6.6E−11 |
| 42D07 | 8.5E−11 |
| 42F01 | 8.9E−11 |
| 42C08 | 9.4E−11 |
| 42E07 | 1.0E−10 |
| 42E01 | 1.0E−10 |
| 51C02 | 1.0E−10 |
| 42B06 | 1.1E−10 |
| 41E01 | 1.1E−10 |
| 51F04 | 1.2E−10 |
| 51F02 | 1.2E−10 |
| 42C07 | 1.3E−10 |
| 51D01 | 1.3E−10 |
| 42E06 | 1.8E−10 |
| 51F01 | 5.5E−10 |
| 51E03 | 1.4E−09 |
| 51B04 | 1.5E−09 |

### Example 6: Affinity Maturation to Obtain Anti-DLL3 Binders of Improved Affinity

[0242] Certain anti-DLL3 trispecific proteins containing DLL-3 binding sequences that had the most potent TDCC activity in the assay described in Example 5, and an anti-DLL3 trispecific protein containing the parental DLL3 binder DH6, were subcloned into a CHO cell expression vector and were stably transfected in CHO cells (see Running Deer and Allison 2004. Biotechnol. Prog. 20: 880-889). The DLL3 binding sequences were: DH6 (SEQ ID NO: 75); 51A2 (SEQ ID NO: 408); 51A5 (SEQ ID NO: 411); 51F3 (SEQ ID NO: 423); 51G2 (SEQ ID NO: 425); 51G10 (SEQ ID NO: 427); 51H5 (SEQ ID NO: 429); 51X5 (SEQ ID NO: 1886); 52B1 (SEQ ID NO: 430); 52C4 (SEQ ID NO: 431); and 52D4 (SEQ ID NO: 432). The trispecific proteins were purified into conditioned medium from pools of stable clones using protein A and ion exchange chromatography. An SDS-PAGE image of the purified proteins is provided in FIG. 17.

[0243] The affinity measurements for human and cynomolgus DLL3 were made using 60 nM, 20 nM, 6.67 nM, and 2.22 nM concentrations of biotinylated DLL3 targeting trispecific proteins immobilized on Octet streptavidin tips. The affinities determined from the measurements are listed in Table 10. In this experiment, anti-DLL3 trispecific containing DH6, the parental DLL3 binder sequence to the affinity matured DLL3 binder sequences, had K_{D} values of 13.5 nM for human DLL3 and 11 nM for cynomolgus DLL3. In comparison, the ten anti-DLL3 trispecific proteins containing the affinity matured DLL3 binder molecules tested in this experiment had K_{D} values ranging from 0.9 to 2.2 nM for human DLL3 and 1.4 to 3.4 nM for cynomolgus DLL3. Thus, the improvements in affinity range from 6.1 to 15-fold for human DLL3 and from 3.2 to 7.9-fold for cynomolgus DLL3.

[0244] The purified proteins were tested in TDCC assays, using the same method as described in Example 2 except that two additional DLL3 expressing cell lines were included in the assay, DMS-53 and NCI-H510A. The EC₅₀ values from these TDCC assays are listed in Table 11, and the graphs of the DMS-53 and DMS-153 TDCC data are provided, respectively, in FIGS. 18-19. A trispecific molecule targeting GFP had no activity in these assays (as shown in FIGS. 18-19). Compared to the parental molecule DH6, the EC₅₀ values improved 2.3 to 12.1-fold in DMS-153 cells, 4.5 to 31.5-fold in NCI-H510A cells, and 8.1 to 26.1-fold in DMS-153 cells.

TABLE 10
Affinities of purified CHO expressed affinity
matured anti-DLL3 trispecific proteins for
human and cynomolgus DLL3 protein in vitro.

| Name | huDLL3 K_{D} (nM) | cyDLL3 K_{D} (nM) |
|---|---|---|
| DH6 | 13.5 | 11.0 |
| 51A2 | 1.2 | 2.0 |
| 51A5 | 1.2 | 1.6 |
| 51F3 | 1.4 | 2.0 |
| 51G2 | 2.0 | 3.4 |
| 51G10 | 0.9 | 1.4 |
| 51H5 | 0.9 | 1.6 |
| 51X5 | 1.0 | 1.5 |
| 52B1 | 1.1 | 1.9 |
| 52C4 | 2.2 | 3.0 |
| 52D4 | 0.9 | 1.7 |

TABLE 11
TDCC Activity of purified CHO expressed affinity matured
anti-DLL3 trispecific proteins with DMS153, NCI-H510A,
and DMS53 cell lines and human T cells

| | DMS153 | NCI-H510A | DMS53 |
|---|---|---|---|
| Name | EC₅₀ (pM) | EC₅₀ (pM) | EC₅₀ (pM) |
| 51A2 | 16.7 | 9.1 | 9.8 |
| 51G2 | 37.7 | 3.7 | 15.9 |
| 51G10 | 11.0 | 2.3 | 9.6 |
| 51H5 | 6.0 | 2.4 | 5.4 |
| 51X5 | 9.0 | 2.8 | 8.3 |
| 52B1 | 9.1 | 1.3 | 6.5 |
| 52C4 | 17.9 | 2.0 | 15.9 |
| 52D4 | 7.2 | 2.5 | 4.9 |

### Example 7: T Cell Dependent Cellular Cytotoxicity Assay using Exemplary DLL3 Targeting Trispecific Proteins comprising a DLL3 Binding Protein of this Disclosure

[0245] Several exemplary DLL3 trispecific proteins containing a DLL3 binding domain of this disclosure, 52D04 (SEQ ID NO: 432), were tested in a T cell dependent cellular cytotoxicity (TDCC) assay (see, Nazarian A A, Archibeque I L, Nguyen Y H, Wang P, Sinclair A M, Powers D A. 2015. J Biomol Screen. 20:519-27), the results are shown in FIGS. 22-24. The trispecific proteins contained a DLL3 binding domain, an albumin binding domain (anti-ALB), and a CD3 binding domain (anti-CD3), in an anti-DLL3:anti-ALB:anti-CD3 configuration (TAC), as shown in FIG. 20, or in an anti-CD3: anti-ALB: anti-DLL3 (CAT) configuration, as shown in FIG. 21. The TDCC assay was carried out in the presence or absence of 15 mg/ml human serum albumin (HSA). In this assay, luciferase labelled NCI-H2171 (FIG. 22), DMS-79 (FIG. 23), SHP77 (FIG. 24), or WM2664 (FIG. 25) cells were combined with purified human T cells and a titration of the exemplary DLL3 binding trispecific proteins, in the presence or absence of albumin. It was hypothesized that if an DLL3 binding trispecific protein directed T cells to kill the DLL3-expression NCI-H2171, DMS-79, SHP77, or WM2664 cells, then the viability of those cells, as determined by running a luciferase assay at 48 hours after starting the experiment, should decrease. FIG. 22 illustrates a graph of representative TDCC data, using NCI-H2171 cells, for the DLL3 binding trispecific proteins in the TAC or CAT configurations, containing the following DLL3 binding domains. FIG. 23 illustrates a graph of representative TDCC data, using DMS-79 cells, for the DLL3 binding trispecific proteins in the TAC or CAT configurations, containing the following DLL3 binding domains. FIG. 24 illustrates a graph of representative TDCC data, using SHP77 cells, for the DLL3 binding trispecific proteins in the TAC or CAT configurations, containing the following DLL3 binding domains. FIG. 25 illustrates a graph of representative TDCC data, using WM2664 cells, for the DLL3 binding trispecific proteins in the TAC or CAT configurations, containing the following DLL3 binding domains. EC₅₀ values from the TDCC assay are listed in Table 12. As shown in the graphs and indicated by the EC₅₀ values, in the presence of human serum albumin (HSA) the DLL3 binding trispecific proteins having the CAT orientation (FIG. 21) were more potent in the TDCC assays than the DLL3 binding trispecific proteins having the TAC configuration.

TABLE 12
TDCC Activity of exemplary anti-DLL3 trispecific proteins with
NCI-H2171, DMS-79, SHP77, and cell lines and human T cells

| | | EC₅₀ (pM) | EC₅₀ (pM) |
|---|---|---|---|
| Cell Line | | no HSA | with HSA |
| NCI-H2171 | αDLL3:αALB:αCD3 | 3 | 224 |
| | αCD3:αALB:αDLL3 | 2 | 84 |
| DMS-79 | αDLL3:αALB:αCD3 | 1.1 | 115 |
| | αCD3:αALB:αDLL3 | 0.7 | 41 |
| SHP77 | αDLL3:αALB:αCD3 | 21* | 3953 |
| | αCD3:αALB:αDLL3 | 11* | 821 |
| WM2664 | αDLL3:αALB:αCD3 | 9* | 855 |
| | αCD3:αALB:αDLL3 | 10* | 422 |

*15 mg/ml bovine serum albumin (BSA) was included in these no HSA assays;
the αALB domain did not bind BSA (data not shown)

### Example 8: Binding of exemplary DLL3 targeting trispecific proteins to human T cells

[0246] In a cell binding study, human T cells were incubated in the presence or absence of an exemplary DLL3 targeting trispecific protein (in either anti-DLL3:anti-ALB:anti-CD3 (TAC) configuration (SEQ ID NO: 1891; or anti-CD3:anti-ALB:anti-DLL3 (CAT) configuration (SEQ ID NO: 1890). The human T cells were further incubated with a secondary antibody (anti-trispecific antibody), which is able to recognize the anti-albumin domain in the exemplary trispecific molecules, conjugated to Alexa Fluor 647. Binding of the anti-trispecific antibody was measured by flow cytometry. Robust binding of anti-trispecific antibody was seen in the presence of the exemplary DLL3 trispecific protein in the anti-DLL3:anti-ALB:anti-CD3 (TAC) configuration (right peaks in the plots in FIG. 26) compared to cells incubated with secondary antibody alone or cells incubated without exemplary trispecific proteins or secondary antibody (left peaks in the plots in FIG. 26). Robust binding of anti-trispecific antibody was also seen in the presence of the exemplary DLL3 trispecific protein in the anti-CD3:anti-ALB:anti-DLL3 (CAT) configuration (right peaks in the plots in FIG. 27) compared to cells incubated with secondary antibody alone or cells incubated without exemplary trispecific proteins or secondary antibody (left peaks in the plots in FIG. 27).

### Example 9: Binding of exemplary DLL3 targeting trispecific proteins to DLL3 expressing cancer cell lines

[0247] In another binding study, DLL3 expressing cancer cells [NCI-H82 (lung cancer cell line), SHP77 (lung cancer cell line), DMS53 (lung carcinoma), or NCI-H2171 (lung cancer cell line)] were incubated with exemplary DLL3 targeting trispecific molecules (in CAT or TAC configuration; SEQ ID NO: 1890 and SEQ ID NO: 1891) or a control trispecific molecule that targets GFP. Following incubation, the cells were washed to remove unbound trispecific molecules and further incubated with a secondary antibody, which is able to recognize the anti-albumin domain in the trispecific molecules, conjugated to Alexa Fluor 647 or FITC. Binding of the exemplary DLL3 targeting trispecific molecules or that of the control trispecific molecules to the cells was measured by flow cytometry. Robust binding of DLL3 targeting trispecific (in TAC configuration) to each cell line was observed (right peaks in the plots in FIG. 28) compared to cells incubated with a control trispecific molecule targeting GFP (left peaks in the plots in FIG. 28). Robust binding of DLL3 targeting trispecific (in CAT configuration) to each cell line was also observed (right peaks in the plots in FIG. 29) compared to cells incubated with a control trispecific molecule targeting GFP (left peaks in the plots in FIG. 29). In control experiments with cell lines that lack DLL3 expression, HCTI16 (colon cancer cell line) and NCI-H292 (lung cancer cell line), similar amount of anti-trispecific antibody were bound to cells incubated with the exemplary DLL3 targeting trispecific proteins or GFP-targeting control trispecific molecules (data not shown), indicating the exemplary DLL3-targeting trispecific molecules did not bind to cells lacking DLL3 expression.

### Example 10: Ability of Exemplary DLL3 Targeting Trispecific Proteins to Direct T Cell Mediated Killing of DLL3 Expressing Cancer Cell Lines

[0248] The aim of this study was to assess if exemplary DLL3 targeting trispecific molecules were able to direct T cells to kill the DLL3-expressing cell lines NCI-H82, SHP77, DMS53, and NCI-H2171. The DLL3-expressing cells used in this study were engineered to express luciferase.

[0249] For the TDCC assay (T cell dependent cellular cytotoxicity assay) T cells from four healthy donors (donor 2; donor 47; donor 81; donor 86) and the DLL3-expressing cells were mixed and varying amounts of exemplary DLL3 targeting trispecific proteins (in CAT or TAC configurations; SEQ ID NO: 1890 and SEQ ID NO: 1891) was added to the mixture. The mixture was incubated for 48 hours at 37° C. As a control, parallel experiments were performed using a control trispecific molecule targeting GFP. After 48 hours, the remaining viable DLL3-expressing cells were quantified using a luminescence assay. It was observed that the DLL3-targeting trispecific molecules (in both TAC and CAT configurations) were able to efficiently direct T cells from all four healthy donors to kill all four DLL3 expressing cell lines (see FIGS. 30, 31, 32, and 33 for results using the TAC configuration; see FIGS. 34, 35, 36, and 37 for results using the CAT configuration) whereas the control GFP TriTAC molecule was not able to do that (also shown in FIGS. 30-37). The EC₅₀ values are presented in Table 13 and Table 14. Further TDCC assays were carried out with DLL3-targeting TriTAC and cell lines that lack DLL3 expression, NCI-H292 and HCT116. It was observed that the DLL3-targeting TriTAC was not able to direct T cells to kill these two cell lines lack DLL3 expression (data not shown).

TABLE 13
EC₅₀ values for TDCC assays performed using exemplary DLL3
targeting trispecific proteins containing DLL3 binding domain
of this disclosure, 52D04, in an anti-DLL3:anti-ALB:anti-CD3
(TAC) configuration, tested in the presence of human serum
albumin (HSA), using T cells from four different donors.

EC₅₀ (M)

| Cell Line | Donor 02 | Donor 47 | Donor 81 | Donor 86 |
|---|---|---|---|---|
| NCI-H82 | 3.6E−11 | 3.3E−11 | 8.0E−11 | 1.4E−10 |
| SHP77 | 2.7E−10 | 1.4E−10 | 3.8E−10 | 7.0E−10 |
| DMS53 | 2.3E−10 | 2.8E−10 | 2.8E−10 | 7.7E−10 |
| NCI-2171 | 4.0E−10 | 2.4E−10 | 7.5E−10 | 1.0E−09 |

TABLE 14
EC₅₀ values for TDCC assays performed using exemplary DLL3
targeting trispecific proteins containing DLL3 binding domain
of this disclosure, 52D04, in an anti-CD3:anti-ALB:anti-DLL3
(CAT) configuration, tested in the presence of human serum
albumin (HSA), using T cells from four different donors.

EC₅₀ (M)

| Cell Line | Donor 02 | Donor 47 | Donor 81 | Donor 86 |
|---|---|---|---|---|
| NCI-H82 | 2.0E−11 | 1.6E−11 | 4.5E−11 | 5.9E−11 |
| SHP77 | 6.3E−11 | 3.6E−11 | 8.4E−11 | 1.9E−10 |
| DMS53 | 7.0E−11 | 7.2E−11 | 8.0E−11 | 2.2E−10 |
| NCI-2171 | 1.6E−10 | 7.6E−11 | 2.9E−10 | 3.2E−10 |

### Example 11: DLL3 Dependent Activation of T Cells by Exemplary DLL3 Targeting Trispecific Proteins

[0250] In this assay, T cells from 4 different healthy donors (donor 2; donor 35; donor 47; and donor 86) and NCI-H82 or DMS53 cells were incubated with exemplary DLL3 targeting trispecific proteins (in CAT or TAC configurations; SEQ ID NO: 1890 and SEQ ID NO: 1891) for 48 hours at 37° C. T cells from the same donors were also incubated for 48 hours at 37° C. with a control trispecific molecule, GFP TriTAC, which targets GFP and NCI-H82 or DMS53 cells. After 48 hours, T cells were collected, and CD69 and CD25 expression on the T cells was measured by flow cytometry. Increased CD69 or CD25 expression was detected on T cells from all 4 healthy donors in presence of NCI-H82 or SHP77 cells and DLL3 targeting trispecific molecules but not in presence of the negative control GFP TriTAC, as seen in FIGS. 38-45. A parallel experiment was performed with HCT116 cells, which lack DLL3 expression. No increase CD69 or CD25 expression was observed with DLL3 trispecific molecules tested using HCT116 cells (data not shown).

### Example 12: DLL3 Dependent Cytokine Production by T Cells Induced by Exemplary DLL3 Targeting Trispecific Proteins

[0251] In this assay, T cells from a healthy donor and NCI-H82 or SHP77 cells were incubated with exemplary DLL3 targeting trispecific molecules (in CAT or TAC configuration; SEQ ID NO: 1890 and SEQ ID NO: 1891) for 48 hours at 37° C. T cells from the same donor were also incubated for 48 hours at 37° C. with a control trispecific molecule, GFP TriTAC, which targets GFP and NCI-H82 or DMS53 cells. After 48 hours, conditioned media were collected, and the amount of various cytokines present in the conditioned media were measured using an electrochemiluminscent assay (Meso Scale Discovery). It was observed that IFNγ, IL-2, and TNFα were secreted into the medium in presence of NCI-H82 or SHP77 cells and DLL3 targeting trispecific molecules but not in presence the control GFP-targeting TriTAC molecule. For the DLL3 targeting trispecific molecule in TAC configuration: IFNγ production is shown in FIGS. 46 and 47; IL-2 production is shown in FIGS. 48 and 49; TNFα production is shown in FIGS. 50 and 51. For the DLL3 targeting trispecific molecule in CAT configuration: IFNγ production is shown in FIGS. 52 and 53; IL-2 production is shown in FIGS. 54 and 55; TNFα production is shown in FIGS. 56 and 57.

### Example 13: Inhibition of Growth of NCI-H82 Xenografts by Exemplary DLL3 Targeting Trispecific Proteins

[0252] For this study, 5×10⁶ human T cells and 5×10⁶ NCI-H82 small cell lung cancer cells were injected into mice at day 0. On days 1 to 10, mice were injected daily intraperitoneally (i.p.) with exemplary DLL3 targeting trispecific molecules (in CAT or TAC configurations; SEQ ID NO: 1890 and SEQ ID NO: 1891) at doses of 20, 100, or 500 μg/kg or negative control GFP-targeting TriTAC at a dose of 500 μg/kg. Tumor volumes were measured after every few days starting at day 7 and ending on day 24. Significant inhibition of tumor growth was observed in the mice injected with the DLL3-targeting trispecific proteins at all doses compared to mice dosed with the GFP-targeting TriTAC dosed at 500 μg/kg, as shown in FIG. 58.

### Example 14: Elimination NCI-H82 Xenografts by Exemplary DLL3 Targeting Trispecific Proteins

[0253] For this study, 5×10⁶ NCI-H82 small cell lung cancer cells were injected subcutaneously on day 0. Mice were randomized on day 8, and 2×10⁷ human T cells were injected per mouse. On days 9 to 18, mice were injected daily i.p. with the exemplary DLL3 targeting trispecific molecules (in CAT configuration; SEQ ID NO: 1890) at doses of 1, 10, or 100 μg/kg or negative control GFP-targeting TriTAC at a dose of 100 μg/kg. Tumor volumes were measured after every few days starting at day 8 and ending at day 29. Significant inhibition of tumor growth was observed in the mice injected with DLL3 targeting trispecific molecules at doses of 10 and 100 μg/kg compared to mice dosed with the GFP targeting TriTAC dosed at 100 μg/kg, as shown in FIG. 59.

### Example 15: Inhibition of Growth of SHP77 Xenografts by Exemplary DLL3 Targeting Trispecific Proteins

[0254] For this study, 5×10⁶ human T cells and 1×10⁷ SHP77 small cell lung cancer cells were injected into mice at day 0. On days 1 to 10, mice were injected daily i.p. with DLL3 targeting trispecific molecules (in CAT configuration; SEQ ID NO: 1890) at doses of 1, 10, or 100 μg/kg or negative control GFP-targeting TriTAC at a dose of 100 μg/kg. Tumor volumes were measured after every few days starting at day 6 and ending on day 28. Significant inhibition of tumor growth was observed in the mice injected with DLL3-targeting trispecific molecules at doses of 10 and 100 μg/kg compared to mice dosed with the GFP-targeting TriTAC dosed at 100 μg/kg, as shown in FIG. 60.

### Example 16: Pharmacokinetic Profile of Exemplary DLL3 Targeting Trispecific Proteins

[0255] DLL3-targeting trispecific proteins have a half-life of ˜ 3 to ˜3.9 days in cynomolgus monkeys when dosed at 0.3 mg kg

[0256] For this study, cynomolgus monkeys were injected with 0.3 mg/kg doses of exemplary DLL3-targeting trispecific molecules (in CAT or TAC configurations; SEQ ID NO: 1890 and SEQ ID NO: 1891), intravenously, and serum samples were collected at various time points after the injection. Two monkeys were injected for each dose. The amount of DLL3 targeting trispecific molecule in the serum was measured using anti-idiotype antibodies recognizing the trispecific molecule, in an electrochemiluminescent assay. FIG. 61 shows a plot for the serum DLL3 targeting trispecific molecule levels at various time points. The data was then used to calculate the pharmacokinetic properties of the DLL3 targeting trispecific molecules, as provided in Table 15. Human dosing schedule of once or twice a week is contemplated based on the pharmacokinetic data.

TABLE 15
Pharmacokinetics of exemplary DLL3
targeting trispecific molecules

| | Half life | AUC 0-inf | CL | Vss |
|---|---|---|---|---|
| ID | (h) | (h*nM) | (L/h/kg) | (l/kg) |
| 1 | 93.1 | 7210 | 0.000832 | 0.0869 |
| 2 | 72.4 | 6690 | 0.000896 | 0.0731 |
| 3 | 82.6 | 7900 | 0.00076 | 0.0767 |
| 4 | 77 | 7890 | 0.00076 | 0.0712 |

[0257] DLL3 targeting trispecific protein has a half-life of ˜ 2.8 to ˜3.3 days in cynomolgus monkeys when dosed at 1 or 10 mg kg:

[0258] For this study, cynomolgus monkeys were injected with 1 mg/kg or 10 mg/kg dose of exemplary DLL3 targeting trispecific molecules, intravenously, and serum samples were collected at various time points after the injection. Two monkeys were injected for each dose. The amount of DLL3-targeting TriTAC in the serum was measured using anti-idiotype antibodies recognizing the TriTAC molecule, in an electrochemiluminescent assay. FIG. 62 shows a plot for the serum DLL3 targeting trispecific molecule levels at various time points. The data was then used to calculate the pharmacokinetic properties of the TriTAC molecule, as provided in Table 16. The pharmacokinetic data suggest that once or twice weekly dosing in humans.

TABLE 16
Pharmacokinetics of exemplary DLL3
targeting trispecific molecules

| Dose | Half life | Cₘₐₓ | AUC 0-inf | CL | Vss |
|---|---|---|---|---|---|
| (mg/kg) | (h) | (nM) | (h*nM) | (mL/h/kg) | (l/kg) |
| 1 | 67.5 | 493 | 23,800 | 0.79 | 63.8 |
| 10 | 78.6 | 4,492 | 236,500 | 0.80 | 71.9 |

[0259] Exemplary DLL3 targeting trispecific proteins were tolerated in cynomolgus monkeys when given as a single dose up to 10 mg kg:

[0260] A transient increase in serum cytokine levels were observed, mainly at 10 mg/kg dosage of administration of exemplary DLL3 targeting trispecific protein (in CAT configuration) (FIG. 63; IFNγ-FIG. 63 top panel, IL-6 FIG. 63 second panel; IL-10 FIG. 63 third panel). Transient T cell margination and T cell activation were also observed (data not shown). At terminal and recovery euthanasia, no DLL3 trispecific protein-related macroscopic findings or organ weight differences were observed, and at recovery euthanasia, no DLL3 trispecific protein-related microscopic findings were observed.

[0261] To demonstrate the DLL3-targeting TriTAC retained cell directed killing activity after being administered to a cynomolgus monkey, a serum sample form the 10 mg/kg dose group collected at 168 h after dosing was tested in a DMS53 TDCC assay and was compared to DLL3-targeting TriTAC that was freshly thawed. Identical cell DMS53 cell killing was observed with the serum sample and the freshly thawed protein (FIG. 64), indicating the DLL3-targeting TriTAC retains the ability to direct T cells to kill target cells 1 week after being dosed in a cynomolgus monkey.

### Example 17: Xenograft Tumor Model

[0262] An exemplary anti-DLL3 targeting trispecific protein of this disclosure is evaluated in a xenograft model.

[0263] Female immune-deficient NOD/SCID mice are sub-lethally irradiated (2 Gy) and subcutaneously inoculated with 1×10⁶ NCI-H28 cells into their right dorsal flank. When tumors reach 100 to 200 mm³, animals are allocated into 3 treatment groups. Groups 2 and 3 (8 animals each) are intraperitoneally injected with 1.5×10⁷ activated human T-cells. Three days later, animals from Group 3 are subsequently treated with a total of 9 intravenous doses of exemplary DLL3 trispecific antigen-binding protein (such as 1, 10, 50, or 100 μg/kg) (qdx9d). Groups 1 and 2 are only treated with vehicle. Body weight and tumor volume are determined for 30 days.

[0264] It is expected that animals treated with the exemplary DLL3 targeting trispecific proteins of the previous examples have a statistically significant delay in tumor growth in comparison to the respective vehicle-treated control group.

### Example 18: Proof-of-Concept Clinical Trial Protocol for Administration of an Exemplary DLL3 Trispecific Antigen-Binding Protein (Anti-DLL3 Trispecific Protein) to Neuroendocrine Cancer Patients

[0265] This is a Phase I/II clinical trial for studying an exemplary DLL3 trispecific antigen-binding protein as a treatment for a Neuroendocrine Cancer.

### Study Outcomes

[0266] Primary: Maximum tolerated dose of the exemplary DLL3 targeting trispecific protein

[0267] Secondary: To determine whether in vitro response of the exemplary DLL3 targeting trispecific proteins are associated with clinical response

[0268] Phase I: The maximum tolerated dose (MTD) will be determined in the phase I section of the trial. 1.1: The maximum tolerated dose (MTD) will be determined in the phase I section of the trial. 1.2: Patients who fulfill eligibility criteria will be entered into the trial to evaluate the exemplary DLL3 targeting trispecific protein. 1.3: The goal is to identify the highest dose of the exemplary anti-DLL3 trispecific protein that can be administered safely without severe or unmanageable side effects in participants. The dose given will depend on the number of participants who have been enrolled in the study prior and how well the dose was tolerated. Not all participants will receive the same dose.

[0269] Phase II: 2.1: A subsequent phase II section will be treated at the MTD with a goal of determining if therapy with therapy of the exemplary DLL3 targeting trispecific proteins results in at least a 20% response rate. Primary Outcome for the Phase II—To determine if therapy with the exemplary DLL3 targeting trispecific protein trispecific protein results in at least 20% of patients achieving a clinical response (blast response, minor response, partial response, or complete response)

[0270] Eligibility: Biopsy proven neuroendocrine tumor, which is somatostatin receptor positive as demonstrated on somatostatin receptor PET. All sites or origin are eligible. Functional and nonfunctional tumors are allowed. Not a candidate for surgical debulking. ECOG performance status 0, 1 or 2. Age >18. Ability to understand a written informed consent document, and the willingness to sign it.

### Example 19: DLL3 Trispecific Antigen-Binding Protein Phase 1/2a Dose Escalation, Expansion, Safety and Pharmacokinetics Study

[0271] Target population: Patients with small cell lung cancer (SCLC) relapsed after platinum chemotherapy, or other malignancies with high grade neuroendocrine features relapsed/refractory (R/R) to Standard of Care (SOC) or no SOC available (includes neuroendocrine prostate cancer (NEPC) and other neuroendocrine neoplasms (NENs)).

[0272] Trial Objectives: Assess safety and tolerability at increasing dose levels, determine PK and pharmacodynamic data and evaluate preliminary anti-tumor activity.

[0273] Trial Design: DLL3 trispecific antigen-binding protein Phase 1/2a trial design is shown in FIG. 65. Trial objectives are assessing safety and tolerability at increasing dose levels, determining pK and pharmacodynamic data and evaluating preliminary anti-tumor activity

[0274] Dosing and administration: DLL3 trispecific antigen-binding protein (SEQ ID NO: 1890) was administered once weekly through infusion starting at 15 μg (flat dose), which corresponds to the EC50. One cycle is 21 days with three doses. Patients received premedication with dexamethasone, Tylenol, and histamine receptor blockers at initial dose(s). Table 17 shows the dosing cohorts and number of subjects. The once weekly administration was tolerated and no dose-limiting toxicity (DLT) is observed to date. Table 18 shows the baseline demographics of these patients. Medium number of prior systemic therapies is 2 and range is 1-5. 77.8% of the patients had prior exposure to an immune checkpoint inhibitor, which includes 100% of SCLC patients).

TABLE 17
DLL3 trispecific antigen-binding protein dosing cohorts

| | | |
|---|---|---|
| Cohort | Dose μg | N |

Fixed Dose, Single Patient Dose Escalation Cohorts
(includes backfill patients)

| | | |
|---|---|---|
| 1 | 15 | 1 |
| 2 | 45 | 1 |
| 3 | 135 | 1 |
| 4 | 405 | 3 |
| 5 | 1215 | 4 |
| 6 | 3600 | 1 |

Step Dosing 3 + 3 Dose Escalation Cohorts

| | | |
|---|---|---|
| 7 | 3600 → 7200 | 4 |
| 8 | 2000 → 12000 | 3 |
| Total | | 18 |

TABLE 18
Patient baseline demographics

| | All Patients |
|---|---|
| Baseline Characteristic | (N = 18) |
| Median age, years (range) | 61 (43-73) |
| Race | N (%) |
| White | 17 (94.4%) |
| Asian | 1 (5.6%) |
| ECOG performance status | N (%) |
| 0 | 9 (50%) |
| 1 | 9 (50%) |
| Disease: | |
| Small Cell Lung Cancer, n (%) | 11 (61.1%) |
| Neuroendocrine Prostate Cancer, n (%) | 2 (11.1%) |
| Other Neuroendocrine Tumor (NENs)*, n (%) | 5 (27.8%) |
| Prior lines of therapy: | |
| 1 | 5 (27.8%) |
| 2 | 5 (27.8%) |
| 3 | 3 (16.7%) |
| 4 | 3 (16.7%) |
| 5 | 2 (11.1%) |
| Immune checkpoint inhibitor (αPD-1/αCTLA4, | 14 (77.8%) |
| αPD-L1) | |

*Other NENs: Retroperitoneal (unknown primary), Colon, Pancreas, Thymic, Bladder

[0275] Time on Treatment: the median treatment duration is 11.6 weeks, which ranges from 4.1 t41.4 weeks. 6 out of the 10 patients (33%) is on treatment for over 20 weeks. FIG. 66 demonstrates the patient time on treatment, dose per week, and number of prior treatments.

[0276] Safety and Tolerability: There is no Dose Limiting Toxicities (DLTs) observed. Grade 1-2 CRS were reported in [4 (220)] of patients, and there is no Grade ≥3 CRS reported. There is no immune effector cell-associated neurotoxicity syndrome (ICANS) reported. No patients were discontinued due to adverse events.

TABLE 19
Treatment Emergent Adverse Events (TEAEs) by Grade ^{a}

| | All Grades, | Grade ≥3, |
|---|---|---|
| Adverse Events | n (%) | n (%) |
| Any treatment-emergent AE | 18 (100%) | 10 (55.6%) |
| Any treatment-related AE | 15 (83.3%) | 1 (5.6%) |

Treatment-Emergent AEs in ≥15% of subjects (MedDRA preferred term)

| | | |
|---|---|---|
| Dysgeusia | 7 (38.9%) | — |
| Fatigue | 7 (38.9%) | — |
| Hypotension | 7 (38.9%) | 1 (5.6%) |
| Constipation | 6 (33.3%) | — |
| Hyponatraemia | 6 (33.3%) | 1 (5.6%) |
| Nausea | 6 (33.3%) | — |
| Vomiting | 6 (33.3%) | — |
| Anaemia | 5 (27.8%) | 2 (11.1%) |
| Chills | 5 (27.8%) | — |
| Pyrexia | 5 (27.8%) | — |
| Alanine aminotransferase increased | 4 (22.2%) | 1 (5.6%) |
| Aspartate aminotransferase increased | 4 (22.2%) | 1 (5.6%) |
| Cytokine release syndrome | 4 (22.2%) | — |
| Diarrhoea | 3 (16.7%) | — |
| Dry skin | 3 (16.7%) | — |
| Dyspnoea | 3 (16.7%) | — |
| Headache | 3 (16.7%) | — |
| Neutrophil count decreased/Neutropenia | 3 (16.7%) | 2 (11.1%) |
| Weight decreased | 3 (16.7%) | — |

^{a} Grading per CTCAE v1.0, except Cytokine Release Syndrome (Grading per ASTCT 2019)

[0277] Target Lesion Response: 7 out of 18 patients (38.9%) had any decrease in sum of target lesion diameters, including 5 with SCLC, 1 with NEPC and 1 with NEN [thymic atypical carcinoid]). 1 patient with SCLC, 2L had confirmed partial response and is ongoing treatment at 32 weeks. For patients with SCLC, 3 of 11 (27.3%) across all doses had >30% decrease in sum of target lesion diameters. 6 out of 18 patients (33%) showed best overall response of stable disease, including 1 with SCLC, 1 with NEPC, and 1 with NEN.

[0278] FIG. 67 shows maximum percent target lesion response from baseline in each cohort.

[0279] Patient 102 Profile: Patient 102 is a 71-year-old female, who was diagnosed in September 2020 with SCLC. Treatment was initiated at 45 ng/kg, and demonstrated 38% reduction at Week 9, unconfirmed partial response (PR) (FIG. 68). Patent 102 does not have treatment-related adverse effects (AEs) observed to-date and remains on study beyond 9 weeks of treatment.

TABLE 20
Patient 102 baseline Characteristics

| | | | |
|---|---|---|---|
| Stage | IV | Prior Therapies | (1) Cisplatin + |
| | | | Etoposide + |
| | | | Durvalumab |
| | | | (2) Brain |
| | | | irradiation |
| ECOG | 1 | Response to | Progressive |
| | | Most Recent | Disease |
| | | Prior Systemic | |
| | | Therapy | |
| Location of | Target Lesion: | Time on Most | 6.9 Weeks |
| Metastases | Lymph Node | Recent Prior | |
| | Non-Target | Systemic Therapy | |
| | Lesions: Lung, | | |
| | Adrenal, | | |
| | Lymph Nodes | | |

[0280] FIG. 69 illustrates the pharmacokinetic data of the DLL3 trispecific antigen-binding protein for the different dosing cohorts. About 70 hours of half-life extension and increased serum Cmax with dose escalation were observed.

[0281] FIGS. 70A and 70B demonstrate the result of a flow analysis. FIG. 70A demonstrates the T cell margination level after treatment. It shows that there is dose-dependent and transient peripheral T-cell margination. FIG. 70B demonstrates the activation marker induction after treatment. T cell activation observed in 135 μg/week cohort, which supports in vivo T cell activation.

[0282] Patient 111 Profile: Patient 111, a 61-year-old female who was diagnosed in January 2021 with extensive SCLC. Selected target lesion (TL) metastases are one in the lung, two in the liver, and two in the lymph nodes. Non-target lesion (non-TL) metastases are two in the lung two in the liver. Prior systemic treatment includes carboplatin etoposide and atezolizumab for 20.1 weeks. Upon study entry, stable disease was the best response to most recent prior systemic treatment. Treatment was initiated at 1215 μg/week and increased dose to 3600 μg/week starting C3D15 (week 8), later dose escalated to 7000 μg/week. Partial response (PR) was confirmed at week 10 with 53.3% decrease in sum of target lesion diameters, and the patient remains on treatment beyond 32 weeks.

TABLE 21
Patient 111 baseline Characteristics

| | | | |
|---|---|---|---|
| Lesions | TLs: Lung, Liver ×2, | Time on most | 20.1 weeks |
| | Lymph Nodes ×2 | recent prior | |
| | Non-TLs: Lung ×2, | treatment | |
| | Liver | | |
| Prior | 1) Carboplatin + | Best response | Stable Disease |
| Systemic | Etoposide + | to most recent | |
| Treatments | Atezolizumab | prior treatment | |

[0283] FIG. 71A demonstrates the target lesion change over time for patient 111. FIG. 71B CT scans illustrate the reduction in sum of target lesion diameters for patient 111. The target lesion diameters were reduced 38.1% at week 6 post-treatment and were reduced 53.3% at week 10 post-treatment.

[0284] Patient 112 Profile: Patient 112, a 67-year-old male who was diagnosed in April 2020 with extensive SCLC. The TL metastases are two in the liver and two in the lymph nodes. The non-TLs are in liver, lymph nodes, spleen, bone and brain. Prior systemic treatment includes carboplatin, etoposide, and toripalimab (anti-PD1) for 4 cycles in a clinical trial, cisplatin and etoposide for 2 cycles, and Lurbinectedin. Time on most recent prior systemic treatment is 10.9 weeks. Upon study entry, partial response was the best response to most recent prior systemic treatment. Patient 112 received step dose (3.600 μg/week followed by 7,200 μg/week) treatment. At week 9, 27% reduction in sum of target lesion diameters was observed which are primarily in lymph nodes and the liver metastases are stable, symptoms are improved and the patient remains on treatment beyond 10 weeks. At week 27, 64.6% decrease from baseline sum of target lesion diameters was observed and Patient 112 remains on treatment beyond 28 weeks.

TABLE 22
Patient 112 baseline Characteristics

| | | | |
|---|---|---|---|
| Lesions | TLs: Liver ×2, | Time on most | 10.9 weeks |
| | Lymph Nodes ×2 | recent prior | |
| | Non-TLs: Liver, | treatment | |
| | LN ×2, Spleen, | | |
| | Bone, Brain | | |
| Prior | 1) Carboplatin + | Best response | Partial |
| Systemic | Etoposide + | to most | Response |
| Treatments | Toripalimab | recent prior | |
| | 2) Cisplatin + | treatment | |
| | Etoposide | | |
| | 3) Lurbinectedin | | |

[0285] FIG. 72A demonstrates the target lesion change over time for patient 112. FIG. 72B CT scans illustrate the reduction in sum of target lesion diameters for patient 112.

[0286] Patient 113 Profile: Patient 113, a 65-year-old male who was diagnosed in November 2020 with neuroendocrine prostate cancer. The TL metastases are two in the lungs, one in the liver, and two in the lymph nodes. Non-TLs are in the lung, liver, lymph nodes, and prostate. Prior systemic treatment includes cisplatin and etoposide, and CAV. Time on most recent prior systemic treatment is 4 weeks. Upon study entry, progressive disease was the best response to most recent prior systemic treatment. Patient 113 received step dose (3600 μg/week followed by 7200 μg/week) treatment. At week 9, 15.3% reduction in sum of target lesion diameters was observed with shrinkage in lung lesions and prostate, new lesions identified in liver, with quality of life is improvement with significant decrease in urinary symptoms and pain, and the patient remains on study beyond 10 weeks. FIG. 73 demonstrates the target lesion change over time for patient 113.

[0287] Pharmacokinetics. The DLL3 trispecific antigen-binding protein used in this study exhibited linear PK, with dose-proportional increases in exposures at 0.135 to 12 mg, and the median half-life is 71 hours.

[0288] FIG. 74A shows the concentration-time profile. FIG. 74B shows the Cmax by dose.

[0289] Pharmacodynamics. T-cell margination was observed and is consistent with target engagement. Small, transient increases in serum IL-6 and MCP-1 were observed up to 24 hours post dose. “First dose” effect observed with less margination and lower median IL-6 and MCP-1 concentrations with repeat or target dose.

[0290] FIG. 75A shows peripheral IL-6 (FIG. 75A) concentration after first and repeat or target dose. FIG. 75B shows peripheral MCP-1 (FIG. 75A) concentration after first and repeat or target dose. FIG. 75C shows CD8+ T cell margination.

[0291] While preferred embodiments of the present invention have been shown and described herein, it will be obvious to those skilled in the art that such embodiments are provided by way of example only. Numerous variations, changes, and substitutions will now occur to those skilled in the art without departing from the invention. It should be understood that various alternatives to the embodiments of the invention described herein may be employed in practicing the invention. It is intended that the following claims define the scope of the invention and that methods and structures within the scope of these claims and their equivalents be covered thereby.

| SEQ. | | |
|---|---|---|
| ID NO. | name | sequence |
| 1 | DL1 | QVQLQESGGGLVQAGGSLRLSCAASGSIFSIASMGWYRQAPGKQRELVAVITSFSSTNYAD |
| | | SVKGRFTISRDNAKNTVYLQMNSLKPEDTGVYYCNARYFERTDWGQGTQVTVSS |
| 2 | DL74 | QVQLQESGGGLVQAGGSLRLSCAAPGSIFSIASMGWYRQAPGKQRELVAVITSFSSTNYAD |
| | | SVKGRFTISRDNAKNTVYLQMNSLKPEDTGVYYCNARYFERTDWGQGTQVTVSS |
| 3 | DL31 | QVQLQESGGGLVQAGGSLRLSCAASGSIFSIASMAWYRQAPGKQRELVAAITSFSSTNYAD |
| | | SVKGRFTISRDNAKNTVYLQMNSLKPEDTGVYYCNARYFERTDWGQGTQVTVSS |
| 4 | DL3 | QVQLQESGGGLVQAGGSLRLSCAASESIFSINVMAWHRQAPGKQRELVARITSGGSTNYAD |
| | | SVKGRFTISRDNAKNTVYLQMNSLKPEDTGVYYCGAYQGLYAYWGQGTQVTVSS |
| 5 | DL80 | QVQLQESGGGLVQAGGSLRLSCVASGSSFSITSMAWYRQAPGKQRDLVAAITSFGSTNYAD |
| | | SVKDRFTISRDNAKNTVYLQMNSLKPEDTAVYYCNGRVFDHVYWGQGTQVTVSS |
| 6 | DL18 | QVQLQESGGGLVQAGGSLKLSCAASSSIFSISSMSWYRQAPGKQRELVAAITTEDYTNYAD |
| | | SVKGRFTISRDNAKNMMYLQMNSLKPEDTAVYLCNARAFGRDYWGQGTQVTVSS |
| 7 | DL94 | QVQLQESGGGLVQAGGSLKLSCAASSSIFSISSMSWYRQAPGKQRELVAAITSEGSTNYAD |
| | | SVKGRFTISRDNAKNMMYLQMNSLKPEDTAVYRCNARTMGRDYWGQGTQVTVSS |
| 8 | DL17 | QVQLQESGGGLVQPGGSLRLSCAASGSTLNIKIMAWHRQAPGKQRELVATLTSGGNTNYAD |
| | | SVKGRFTISRDNAKNTVYLQMNSLQPEDTAVYYCGLWDGVGGAYWGRGTQVTVSS |
| 9 | DL46 | QVQLQESGGGLVQPGGSLRISCAASGSTLNIKIMAWHRQAPGKQRELVATLTSGGNTNYAD |
| | | SVKGRFTISRDNAKNTVYLQMNSLQPEDTAVYYCGLWDGVGGAYWGRGTQVTVSS |
| 10 | DL15 | QVQLQESGGGLVQAGGSLRLSCAASGSTFNIKTMAWHRQAPGNQRELVATLTSGGNTNYAD |
| | | SVKGRFTISRDNAKNTVYLQMNSLKPEDTAVYYCGLWNGVGGAYWGRGTQVTVSS |
| 11 | DL26 | QVQLQDGGGLVQPGGSLRLSCAASGSTFNIKLMAWHRQAPGNQRELVATLTSGGNTNYADS |
| | | VKGRFTISRDNASNIVYLQMNSLKPEDTAVYYCGLWDGVGGAYWGRGTQVTVSS |
| 12 | DL83 | QVQLQESGGGLVQAGGSLRLSCAASGSTFNFKIMAWHRQAPGKQRELVASLTSEGLTNYRD |
| | | SVKGRFTISRDNAKNTVYLQMNNLKPEDTAVYYCGLWDGVGGAYWGRGTQVTVSS |
| 13 | DL5 | QVQLQESGGGLVQPGGSLRLSCAASGFMFSSYSMSWYRQAPGKQRELVAAITTWGSTNYAD |
| | | SVKGRFTISRDNAKNTVWLQMNSLEPEDTAVYFCNARSWNNYWGQGTQVTVSS |
| 14 | DL22 | QVQLQESGGGLVQVGGSLRLSCAASGFMFSSYSMSWYRQAPGKQRELVAAITSYGSTNYAD |
| | | SVKGRFTISRDNAKNTVWLQMNSLKPEDTAVYFCNARSWNNYWGQGTQVTVSS |
| 15 | DL85 | QVQLQESGGGLVQPGGSLRLSCAASGFTFSSHSMSWYRQAPGKQRELVAAITTYGSTNYID |
| | | SVKGRFTISRDNTKNTVYLQMNSLKPEDTAVYFCNARSWNNYWGQGTQVTVSS |
| 16 | DL69 | QVQLQESGGGLVQAGGSLRLSCVASGSSFSHNTMGWYRQAPGKQRDLVARITTFGTTNYAD |
| | | SVKGRFTISRDNAKNTVYLQMNSLKPEDTAVYYCNGESFGRIWYNWGQGTQVTVSS |
| 17 | DL27 | QVQLQESGGGLVQAGASLRLTCTASGGRFSYATMGWSRQAPGKQREMVARITSSGESTNYA |
| | | DSVKGRFTISRDNAKNAVYLQMDSLKPEDTAVYYCNAQHFGTDSWGQGTQVTVSS |
| 18 | DL51 | QVQLQESGGGLVQAGASLRLTCTASGSRFSYATMGWSRQAPGKQRELVARITSSGESTNYA |
| | | DSVKGRFTISRDNAKNAVYLQMDSLKPEDTAVYYCNAQQFGTDSWGQGTQVTVSS |
| 19 | DL54 | QVQLQESGGGLVQAGGSLRLSCAASGSTFTSNVMGWHRQAPGKQRELVANMHSGGSTNYAD |
| | | SVKGRFTISRDNAKNIVYLQMNNLKIEDTAVYYCRWYGIQRAEGYWGQGTQVTVSS |
| 20 | DL11 | QVQLQESGGGLVVAGGSLRLSCAASGSSVSFLSMAWYRQAPGKKRELVAGISVDGSTNYAD |
| | | SVKGRFTVSRDNAKNTVYLQMNSLQPEDTAVYYCYAYRWVGRDTYWGQGTQVTVSS |
| 21 | DL19 | QVQLQESGGGLVVAGGSLRLSCAASGSSVSFLSMAWYRQAPGKKRELVAGISVDGSTNYAD |
| | | SVKGRFTISRDNAKNTVYLQMNSLQPEDTAVYYCYAYRWVGRDTYWGQGTQVTVSS |
| 22 | DL68 | QVQLQESGGGLVVSGGSLRLSCAASGSSVSFLSMAWYRQAPGKKRELVAGISVDGSTNYAD |
| | | SVKGRFTISRDNAKNTVYLQMNSLQPEDTAAYYCYAYRWVGRDTYWGQGTQVTVSS |
| 23 | DL14 | QVQLQESGGGLVVAGGSLRLSCAASGSSVSFLSMAWYRQAPGKKRELVAGISVDGSTNYAD |
| | | SVKGRFTISRDNAENTVYLQMNSLQPEDTAVYYCYAYRWEGRDTYWGQGTQVTVSS |
| 24 | DL67 | QVQLQESGGGLVVAGGSLRLSCAASGSSVSFLSMAWYRQAPGKKRELVAGISVDGSTNYAD |
| | | SVKGRFTISRDNAENTVYLQMNSLQPEDTAVYYCYAYRWEGRNTYWGQGTQVTVSS |
| 25 | DL56 | QVQLQESGGGLVQPGGSLRLSCAASGSSVSFLSMAWYRQAPGKKRELVAGISTDGSTNYVD |
| | | SVKGRFTISRDNAKNTVYLQMNSLQPEDTAVYYCYAYRWVGRYTYWGQGTQVTVSS |
| 26 | DL13 | QVQLQESGGGLVVAGGSLRLSCAASGSSVSFLSMAWYRQAPGKKRELVAGISTDGTTNYVD |
| | | SVKDRFTISRDNAKNTVYLQMNSLQPEDTAAYYCYAYRWVGRDTYWGQGTQVTVSS |
| 27 | DL77 | QVQLQESGGGLVVAGGSLRLSCAASGSSVSFLSIAWYRQAPGKKRELVAGISTDGTTNYVD |
| | | SVKDRFTISRDNAKNTVYLQMNSLQPEDTAAYYCYAYRWVGRDTYWGQGTQVTVSS |
| 28 | DL79 | QVQLQESGGGLVQAGGSLTLSCAASGSSVSFLSMAWYRQAPGKKRELVAGISTDGTTNYVD |
| | | SVKDRFTISRDNAKNTVYLQMNSLQPEDTAAYYCYAYRWVGRDTYWGQGTQVTVSS |
| 29 | DL20 | QVQLQESGGGLVQAGGSLRLSCAASGSSVSFLSMAWYRQAPGKKRELVAGISTDGSTNYAD |
| | | SVKGRFTISEGNAKNTVDLQMNSLQPEDTAVYYCYAYRWVDRYTYWGQGTQVTVSS |
| 30 | DL41 | QVQLQESGGGLVVAGGSLRLSCAASGSSVSFLSMAWYRQAPGKKRELVAGISTDGSTNYAD |
| | | SVKGRFTISEDNAKNTVDLQMNSLQPEDTAVYYCYAYRWIDRYTYWGQGTQVTVSS |
| 31 | DL59 | QVQLQESGGGLVQPGGSLRLSCAASGSSVSFLSMAWYRQAPGKKRELVAGISTDGSTNYAD |
| | | SVKGRFTISEDNAKNTVDLQMNSLQPEDTAVYYCYAYRWVDRYTYWGQGTQVTVSS |
| 32 | DL16 | QVQLQESGGGLVVAGGSLRLSCAASGSSVSFLSMAWYRQAPGKKRELVAGISSDGSTNYVD |
| | | SVKGRFTISRDNAKNIVELQMNSLQPQDTAVYYCYAYRWVGRDTYWGQGTQVTVSS |
| 33 | DL6 | QVQLQESGGGLVVAGGSLRLSCAASGSSVSFLSMAWYRQAPGKKRELVAGISADGSTDYID |
| | | SVKGRFTISRDSANNTMYLQMNSLQPEDTAVYYCYAYRWTTRYTYWGQGTQVTVSS |
| 34 | DL84 | QVQLQESGGGLVQPGGSLRLSCAASGFTLDYYAIGWYRQAPGKKRELVAGISSDGSTHYVD |
| | | SVKGRFAISRDNAENTVYLQMNDLQPDDTAVYYCYAYRWVGGYTYWGQGTQVTVSS |
| 35 | DL2 | QVQLQESGGGLVQAGGSLRLSCVASGSTSSINAMGWYRRAPGKQRELVAGISSDGSKNYAD |
| | | SVKGRFTISRDNAKNTVYLQMNSLKPEDTAVYYCYYERTVAASSMQYWGQGTQVTVSS |
| 36 | DL43 | QVQLQESGGGLVQAGGSLRLSCVASGSTSSINAMGWYRRAPGKQRELVAGISSDGSKVYAD |
| | | SVKGRFTISRDNAKNTVYLQMNSLKPEDTAVFYCYYFRTVSGSSMRYWGQGTQVTVSS |
| 37 | DL92 | QVQLQESGGGLVQAGGSLRLSCAASGITSSVYSMGWYRQAPGKQRELVAGSSSDGSTHYVD |
| | | SVRGRFTISRDNAKNTVYLQMSSLKPEDTAVYYCYANRGFAGAPSYWGQGTQVTVSS |
| 38 | DL10 | QVQLQESGGGLVQAGGSLRLSCAASGRTSMFNSMGWHRQAPGKQRELVAIIRSGGSSNYAD |
| | | TVKGRFTISRDNTKNTVYLQMNDLKPEDTAVYYCFYYFQSSYWGQGTQVTVSS |
| 39 | DL82 | QVQLQESGGGLVQAGGSLRLSCAASGRTSMVNSMGWHRQAPGKQRELVALITSGGSSNYAD |
| | | TVKGRFTISRDNTKNTVYLQMNDLKPEDTAVYYCFYYFQSSYWGQGTQVTVSS |
| 40 | DL23 | QVQLQESGGGLVQAGGSLRLSCAASGSVSMFNSMGWHRQPPGKQRELVAIITSGGSSNYAD |
| | | TVKGRFTISRDNTKNTVYLQMNDLKPEDTAVYYCFYYFQSSYWGQGTQVTVSS |
| 41 | DL42 | QVQLQESGGGLVQAGGSLRLSCTASGSIFSIAVMGWYRQVPGKRREWVATIFDGSYTNYAD |
| | | SVKGRFTISRDNARNKVYLQMNNLKPEDTAVYYCQTHWTQGSVPKESWGQGTQVTVSS |
| 42 | DL45 | QVQLQESGGGLVQAGGSLRLSCVASSGIFSDMSMVWYRQAPGKQRELVASITTFGSTNYAD |
| | | PVKGRFTISRDNAKNTVYLQMNSLKPEDTAVYYCSGRSYSSDYWGRGTQVTVSS |
| 43 | DL58 | QVQLQESGGGLVQAGGSLRLSCVASGSISSIIVMGWSRQAPGKQRESVATITRDGTRNYAD |
| | | SLKGRFTISRDNAKNTSYLQINSLKPEDTAVYSCYARYGDINYWGKGTQVTVSS |
| 44 | DL70 | QVQLQESGGGLVQAGGSLRLSCVASGSISSIIVMGWSRQAPGKQRESLATISRGGTRTYAD |
| | | SVKGRFTISRDNAKNTSYLQMNSLKPEDTAVYSCYARYGDINYWGKGTQVTVSS |
| 45 | DL89 | QVQLQESGGGLVQAGGSLRLSCVASGSIFTTNSMGWHRQGPGKQRELVALIGSAGSTKYAD |
| | | SVKGRFTISRDNAKNTVSLQMDSLKPEDTAVYYCFYYDSRSYWGQGTQVTVSS |
| 46 | DL38 | QVQLQESGGGMVQPGGSLRLSCAASGSREISTMGWHRQAPGKQRELAARITSGGITKYADS |
| | | VKGRFTISRDNAKKTVYLQMNSLKSEDTAVYYCFAYDNINAYWGQGTQVTVSS |
| 47 | DL52 | QVQLQESGGGWVQAGGSLRLSCAASGSREISTMGWHRQAPGKQRELAARITSGGITKYADS |
| | | VKGRFTISRDNAKKTVYLQMNSLKSEDTAVYYCFAYDNINAYWGQGTQVTVSS |
| 48 | DL64 | QVQLQESGGGWVQAGGSLRLSCTASGSREISTMGWHRQAPGKQRELAARITSGGITKYADS |
| | | VKGRFTISRDNAKKTVYLQMDSLKSEDTAVYYCFAYDNINAYWGQGTQVTVSS |
| 49 | DL33 | QVQLQESGGGSVQAGRSLGLSCAASGSREISTMGWHRQAPGKQRELAARITSGGITKYADS |
| | | VKGRFTISRDNAKKTVYLQMNSLKSEDTAVYYCFAYDNINAYWGQGTQVTVSS |
| 50 | DL12 | QVQLQESGGGLVQAGGSLRLSCTASGSIFRGAAMYWHRQAPGKQRELVAAITTSGNTSYAD |
| | | SVKGRFTISRDNAKNTMYLQIISLKPEDTAVYYCAFWIAGKAYWGQGTQVTVSS |
| 51 | DL29 | QVQLQESGGGLVQPGGSLRLSCAASGSISSFNFMSWHRQAPGKERELAGVITRGGATNYAD |
| | | SVKGRFTISRDNVKNTVYLQMNGLKPEDTAVYYCHGRSQLGSTWGQGTQVTVSS |
| 52 | DL61 | QVQLQESGGGLVQAGGSLRLSCLASGTIFTASTMGWHRQPPGKQRELVASIAGDGRTNYAE |
| | | STEGRFTISRDDAKNTMYLQMNSLKPEDTAVYYCYAYYLDTYAYWGQGTQVTVSS |
| 53 | DH1 | EVQLVESGGGLVQPGGSLTLSCAASGSIFSIASMGWYRQAPGKQRELVAVITSESSTNYAD |
| | | SVKGRFTISRDNAKNSVYLQMNSLRAEDTAVYYCNARYFERTDWGQGTLVTVSS |
| 54 | DH10 | EVQLVESGGGLVQPGGSLTLSCAASGRTSMFNSMGWHRQAPGKQRELVAIIRSGGSSNYAD |
| | | TVKGRFTISRDNAKNSVYLQMNSLRAEDTAVYYCFYYFQSSYWGQGTLVTVSS |
| 55 | DH11 | EVQLVESGGGLVQPGGSLTLSCAASGSSVSFLSMAWYRQAPGKKRELVAGISVDGSTNYAD |
| | | SVKGRFTISRDNAKNSVYLQMNSLRAEDTAVYYCYAYRWVGRDTYWGQGTLVTVSS |
| 56 | DH12 | EVQLVESGGGLVQPGGSLTLSCTASGSIFRGAAMYWHRQAPGKQRELVAAITTSGNTSYAD |
| | | SVKGRFTISRDNAKNSMYLQMNSLRAEDTAVYYCAFWIAGKAYWGQGTLVTVSS |
| 57 | DH15 | EVQLVESGGGLVQPGGSLTLSCAASGSTFNIKTMAWHRQAPGNQRELVATLTSGGNTNYAD |
| | | SVKGRFTISRDNAKNSVYLQMNSLRAEDTAVYYCGLWNGVGGAYWGQGTLVTVSS |
| 58 | DH17 | EVQLVESGGGLVQPGGSLTLSCAASGSTLNIKIMAWHRQAPGKQRELVATLTSGGNTNYAD |
| | | SVKGRFTISRDNAKNSVYLQMNSLRAEDTAVYYCGLWDGVGGAYWGQGTLVTVSS |
| 59 | DH18 | EVQLVESGGGLVQPGGSLTLSCAASSSIFSISSMSWYRQAPGKQRELVAAITTEDYTNYAD |
| | | SVKGRFTISRDNAKNSMYLQMNSLRAEDTAVYYCNARAFGRDYWGQGTLVTVSS |
| 60 | DH2 | EVQLVESGGGLVQPGGSLTLSCVASGSTSSINAMGWYRRAPGKQRELVAGISSDGSKNYAD |
| | | SVKGRFTISRDNAKNSVYLQMNSLRAEDTAVYYCYYERTVAASSMQYWGQGTLVTVSS |
| 61 | DH22 | EVQLVESGGGLVQPGGSLTLSCAASGFMFSSYSMSWYRQAPGKQRELVAAITSYGSTNYAD |
| | | SVKGRFTISRDNAKNSVYLQMNSLRAEDTAVYYCNARSWNNYWGQGTLVTVSS |
| 62 | DH23 | EVQLVESGGGLVQPGGSLTLSCAASGSVSMFNSMGWHRQPPGKQRELVAIITSGGSSNYAD |
| | | TVKGRFTISRDNAKNSVYLQMNSLRAEDTAVYYCFYYFQSSYWGQGTLVTVSS |
| 63 | DH27 | EVQLVESGGGLVQPGGSLTLSCTASGGRFSYATMGWSRQAPGKQREMVARITSSGESTNYA |
| | | DSVKGRFTISRDNAKNSVYLQMNSLRAEDTAVYYCNAQHFGTDSWGQGTLVTVSS |
| 64 | DH29 | EVQLVESGGGLVQPGGSLTLSCAASGSISSFNFMSWHRQAPGKERELAGVITRGGATNYAD |
| | | SVKGRFTISRDNAKNSVYLQMNSLRAEDTAVYYCHGRSQLGSTWGQGTLVTVSS |
| 65 | DH3 | EVQLVESGGGLVQPGGSLTLSCAASESIFSINVMAWHRQAPGKQRELVARITSGGSTNYAD |
| | | SVKGRFTISRDNAKNSVYLQMNSLRAEDTAVYYCGAYQGLYAYWGQGTLVTVSS |
| 66 | DH38 | EVQLVESGGGLVQPGGSLTLSCAASGSREISTMGWHRQAPGKQRELAARITSGGITKYADS |
| | | VKGRFTISRDNAKNSVYLQMNSLRAEDTAVYYCFAYDNINAYWGQGTLVTVSS |
| 67 | DH42 | EVQLVESGGGLVQPGGSLTLSCTASGSIFSIAVMGWYRQVPGKRREWVATIFDGSYTNYAD |
| | | SVKGRFTISRDNAKNSVYLQMNSLRAEDTAVYYCQTHWTQGSVPKESWGQGTLVTVSS |
| 68 | DH43 | EVQLVESGGGLVQPGGSLTLSCVASGSTSSINAMGWYRRAPGKQRELVAGISSDGSKVYAD |
| | | SVKGRFTISRDNAKNSVYLQMNSLRAEDTAVYYCYYFRTVSGSSMRYWGQGTLVTVSS |
| 69 | DH45 | EVQLVESGGGLVQPGGSLTLSCVASSGIFSDMSMVWYRQAPGKQRELVASITTFGSTNYAD |
| | | PVKGRFTISRDNAKNSVYLQMNSLRAEDTAVYYCSGRSYSSDYWGQGTLVTVSS |
| 70 | DH5 | EVQLVESGGGLVQPGGSLTLSCAASGFMFSSYSMSWYRQAPGKQRELVAAITTWGSTNYAD |
| | | SVKGRFTISRDNAKNSVYLQMNSLRAEDTAVYYCNARSWNNYWGQGTLVTVSS |
| 71 | DH51 | EVQLVESGGGLVQPGGSLTLSCTASGSRFSYATMGWSRQAPGKQRELVARITSSGESTNYA |
| | | DSVKGRFTISRDNAKNSVYLQMNSLRAEDTAVYYCNAQQFGTDSWGQGTLVTVSS |
| 72 | DH54 | EVQLVESGGGLVQPGGSLTLSCAASGSTFTSNVMGWHRQAPGKQRELVANMHSGGSTNYAD |
| | | SVKGRFTISRDNAKNSVYLQMNSLRAEDTAVYYCRWYGIQRAEGYWGQGTLVTVSS |
| 73 | DH56 | EVQLVESGGGLVQPGGSLTLSCAASGSSVSFLSMAWYRQAPGKKRELVAGISTDGSTNYVD |
| | | SVKGRFTISRDNAKNSVYLQMNSLRAEDTAVYYCYAYRWVGRYTYWGQGTLVTVSS |
| 74 | DH58 | EVQLVESGGGLVQPGGSLTLSCVASGSISSIIVMGWSRQAPGKQRESVATITRDGTRNYAD |
| | | SLKGRFTISRDNAKNSSYLQMNSLRAEDTAVYYCYARYGDINYWGQGTLVTVSS |
| 75 | DH6 | EVQLVESGGGLVQPGGSLTLSCAASGSSVSFLSMAWYRQAPGKKRELVAGISADGSTDYID |
| | | SVKGRFTISRDNAKNSVYLQMNSLRAEDTAVYYCYAYRWTTRYTYWGQGTLVTVSS |
| 76 | DH61 | EVQLVESGGGLVQPGGSLTLSCLASGTIFTASTMGWHRQPPGKQRELVASIAGDGRTNYAE |
| | | STEGRFTISRDNAKNSMYLQMNSLRAEDTAVYYCYAYYLDTYAYWGQGTLVTVSS |
| 77 | DH67 | EVQLVESGGGLVQPGGSLTLSCAASGSSVSFLSMAWYRQAPGKKRELVAGISVDGSTNYAD |
| | | SVKGRFTISRDNAKNSVYLQMNSLRAEDTAVYYCYAYRWEGRNTYWGQGTLVTVSS |
| 78 | DH69 | EVQLVESGGGLVQPGGSLTLSCVASGSSFSHNTMGWYRQAPGKQRDLVARITTFGTTNYAD |
| | | SVKGRFTISRDNAKNSVYLQMNSLRAEDTAVYYCNGESFGRIWYNWGQGTLVTVSS |
| 79 | DH70 | EVQLVESGGGLVQPGGSLTLSCVASGSISSIIVMGWSRQAPGKQRESLATISRGGTRTYAD |
| | | SVKGRFTISRDNAKNSSYLQMNSLRAEDTAVYYCYARYGDINYWGQGTLVTVSS |
| 80 | DH80 | EVQLVESGGGLVQPGGSLTLSCVASGSSFSITSMAWYRQAPGKQRDLVAAITSFGSTNYAD |
| | | SVKDRFTISRDNAKNSVYLQMNSLRAEDTAVYYCNGRVFDHVYWGQGTLVTVSS |
| 81 | DH82 | EVQLVESGGGLVQPGGSLTLSCAASGRTSMVNSMGWHRQAPGKQRELVALITSGGSSNYAD |
| | | TVKGRFTISRDNAKNSVYLQMNSLRAEDTAVYYCFYYFQSSYWGQGTLVTVSS |
| 82 | DH83 | EVQLVESGGGLVQPGGSLTLSCAASGSTFNFKIMAWHRQAPGKQRELVASLTSEGLTNYRD |
| | | SVKGRFTISRDNAKNSVYLQMNSLRAEDTAVYYCGLWDGVGGAYWGQGTLVTVSS |
| 83 | DH84 | EVQLVESGGGLVQPGGSLTLSCAASGFTLDYYAIGWYRQAPGKKRELVAGISSDGSTHYVD |
| | | SVKGRFTISRDNAKNSVYLQMNSLRAEDTAVYYCYAYRWVGGYTYWGQGTLVTVSS |
| 84 | DH89 | EVQLVESGGGLVQPGGSLTLSCVASGSIFTTNSMGWHRQGPGKQRELVALIGSAGSTKYAD |
| | | SVKGRFTISRDNAKNSVYLQMNSLRAEDTAVYYCFYYDSRSYWGQGTLVTVSS |
| 85 | DH92 | EVQLVESGGGLVQPGGSLTLSCAASGITSSVYSMGWYRQAPGKQRELVAGSSSDGSTHYVD |
| | | SVRGRFTISRDNAKNSVYLQMNSLRAEDTAVYYCYANRGFAGAPSYWGQGTLVTVSS |
| 86 | DH94 | EVQLVESGGGLVQPGGSLTLSCAASSSIFSISSMSWYRQAPGKQRELVAAITSFGSTNYAD |
| | | SVKGRFTISRDNAKNSMYLQMNSLRAEDTAVYYCNARTMGRDYWGQGTLVTVSS |
| 87 | 1A01 | EVQLVESGGGLVQPGGSLTLSCVASGFTSSINAMGWYRRAPGKQRELVAGISSDGSFVYAD |
| | | SVKGRFTISRDNAKNSVYLQMNSLRAEDTAVYYCYYFRHVSGSSMRYWGQGTLVTVSS |
| 88 | 1A03 | EVQLVESGGGLVQPGGSLTLSCVASGSTSSINAMAWYRRAPGKQRELVAGISSDGSKVYAD |
| | | SVKGRFTISRDNAKNSVYLQMNSLRAEDTAVYYCYYFRTVSGSSSRYWGQGTLVTVSS |
| 89 | 1A04 | EVQLVESGGGLVQPGGSLTLSCVASGSTSSINAMGWYRRAPGKQRELVAGISSDGSKVYED |
| | | SVKGRFTISRDNAKNSVYLQMNSLRAEDTAVYYCYYFRTVSGSSMRYWGQGTLVTVSS |
| 90 | 1A05 | EVQLVESGGGLVQPGGSLTLSCVASGSPSSINAMGWYRRAPGKQRELSAGISSDGSKVYAD |
| | | SVKGRFTISRDNAKNSVYLQMNSLRAEDTAVYYCYYFRTVRGSSMSYWGQGTLVTVSS |
| 91 | 1A06 | EVQLVESGGGLVQPGGSLTLSCVASGSTSSINAMGWYRRAPGKQRELAAGISSDGSSVYAD |
| | | SVKGRFTISRDNAKNSVYLQMNSLRAEDTAVYYCYYFRTVSGSSKRYWGQGTLVTVSS |
| 92 | 1A07 | EVQLVESGGGLVQPGGSLTLSCVASGSISSINAMGWYRRAPGKQRELVAGISSDGSKVYAD |
| | | SVKGRFTISRDNAKNSVYLQMNSLRAEDTAVYYCYYFRMVSGSSMRYWGQGTLVTVSS |
| 93 | 1A09 | EVQLVESGGGLVQPGGSLTLSCVASGSTSSINAMAWYRRAPGKQRELVAGISSDGSKLYAD |
| | | SVKGRFTISRDNAKNSVYLQMNSLRAEDTAVYYCYYFRTVQGSSMRYWGQGTLVTVSS |
| 94 | 1A010 | EVQLVESGGGLVQPGGSLTLSCVASGSTSSINAYGWYRRAPGKQRELVAGISSDGSKVYAD |
| | | SVKGRFTISRDNAKNSVYLQMNSLRAEDTAVYYCYYFRTVYGSSMRYWGQGTLVTVSS |
| 95 | 1A011 | EVQLVESGGGLVQPGGSLTLSCVASGSTSSINAIGWYRRAPGKQRELVAGISSDGSKVYID |
| | | SVKGRFTISRDNAKNSVYLQMNSLRAEDTAVYYCYYFRTVSGSSYRYWGQGTLVTVSS |
| 96 | 1A012 | EVQLVESGGGLVQPGGSLTLSCVASGSTSSINAMAWYRRAPGKQRELVAGISSDGSKVYSD |
| | | SVKGRFTISRDNAKNSVYLQMNSLRAEDTAVYYCYYFRTVLGSSMRYWGQGTLVTVSS |
| 97 | 1B01 | EVQLVESGGGLVQPGGSLTLSCVASGSTSIINAMGWYRRAPGKQRELAAGISSDGSKVIAD |
| | | SVKGRFTISRDNAKNSVYLQMNSLRAEDTAVYYCYYFRRVSGSSMRYWGQGTLVTVSS |
| 98 | 1B02 | EVQLVESGGGLVQPGGSLTLSCVASGSTSSINAMGWYRRAPGKQRELVAGISSDGSKIYAD |
| | | SVKGRFTISRDNAKNSVYLQMNSLRAEDTAVYYCYYFRTVSGSSMRYWGQGTLVTVSS |
| 99 | 1B03 | EVQLVESGGGLVQPGGSLTLSCVASGKTSSINAMAWYRRAPGKQRELVAGISSDGSKVYTD |
| | | SVKGRFTISRDNAKNSVYLQMNSLRAEDTAVYYCYYFRTVSGSSARYWGQGTLVTVSS |
| 100 | 1B04 | EVQLVESGGGLVQPGGSLTLSCVASGTTSSINAMGWYRRAPGKQRELVAGISSDGSLVYAD |
| | | SVKGRFTISRDNAKNSVYLQMNSLRAEDTAVYYCYYFRIVRGSSMRYWGQGTLVTVSS |
| 101 | 1B05 | EVQLVESGGGLVQPGGSLTLSCVASGSTSSINAMAWYRRAPGKQRELVAGISSDGSKVYAD |
| | | SVKGRFTISRDNAKNSVYLQMNSLRAEDTAVYYCYYYRTVSGSSMRYWGQGTLVTVSS |
| 102 | 1B07 | EVQLVESGGGLVQPGGSLTLSCVASGSGSSINAMGWYRRAPGKQRELVAGISSDGSKVYSD |
| | | SVKGRFTISRDNAKNSVYLQMNSLRAEDTAVYYCYYFRHVSGSSMRYWGQGTLVTVSS |
| 103 | 1B08 | EVQLVESGGGLVQPGGSLTLSCVASGTTSSINAMGWYRRAPGKQRELVAGISSDGSKVYVD |
| | | SVKGRFTISRDNAKNSVYLQMNSLRAEDTAVYYCYYFRFVSGSSMRYWGQGTLVTVSS |
| 104 | 1B09 | EVQLVESGGGLVQPGGSLTLSCVASGSTSSINAMAWYRRAPGKQRELVAGISSDGSKVYVD |
| | | SVKGRFTISRDNAKNSVYLQMNSLRAEDTAVYYCYYFRTVSGSSMRYWGQGTLVTVSS |
| 105 | 1B010 | EVQLVESGGGLVQPGGSLTLSCVASGSTSRINAMGWYRRAPGKQRELVAGISSDGSKVYAD |
| | | SVKGRFTISRDNAKNSVYLQMNSLRAEDTAVYYCYYFRTKSGSSMRYWGQGTLVTVSS |
| 106 | 1B011 | EVQLVESGGGLVQPGGSLTLSCVASGSTSRINAMGWYRRAPGKQRELVAGISSDGSKVYAD |
| | | SVKGRFTISRDNAKNSVYLQMNSLRAEDTAVYYCYYFRTVYGSSMRYWGQGTLVTVSS |
| 107 | 1C01 | EVQLVESGGGLVQPGGSLTLSCVASGSTSSINAMGWYRRAPGKQRELVAGISSDGSKVYRD |
| | | SVKGRFTISRDNAKNSVYLQMNSLRAEDTAVYYCYYFRTVSGSSMGYWGQGTLVTVSS |
| 108 | 1C02 | EVQLVESGGGLVQPGGSLTLSCVASGSTSSINAMAWYRRAPGKQRELVAGISSDGSKVYSD |
| | | SVKGRFTISRDNAKNSVYLQMNSLRAEDTAVYYCYYFRTVSGSSMRSWGQGTLVTVSS |
| 109 | 1C03 | EVQLVESGGGLVQPGGSLTLSCVASGSTSSINAMAWYRRAPGKQRELVAGISSDNSKVYAD |
| | | SVKGRFTISRDNAKNSVYLQMNSLRAEDTAVYYCYYFRTVGGSSMRYWGQGTLVTVSS |
| 110 | 1C04 | EVQLVESGGGLVQPGGSLTLSCVASGNTSSINAMAWYRRAPGKQRELVAGISSDGSKVYAD |
| | | SVKGRFTISRDNAKNSVYLQMNSLRAEDTAVYYCYYFRTVSGSSMRYWGQGTLVTVSS |
| 111 | 1C05 | EVQLVESGGGLVQPGGSLTLSCVASGSTSSINAMAWYRRAPGKQRELVAGISSDGSKVYAD |
| | | SVKGRFTISRDNAKNSVYLQMNSLRAEDTAVYYCYYFRTVSGSHMRYWGQGTLVTVSS |
| 112 | 1C06 | EVQLVESGGGLVQPGGSLTLSCVASGSTSIINAMGWYRRAPGKQRELVAGISSDGSKVYED |
| | | SVKGRFTISRDNAKNSVYLQMNSLRAEDTAVYYCYYFRAVSGSSMRYWGQGTLVTVSS |
| 113 | 1C07 | EVQLVESGGGLVQPGGSLTLSCVASGSTSSINAMAWYRRAPGKQRELVAGISSDGSKVYAD |
| | | SVKGRFTISRDNAKNSVYLQMNSLRAEDTAVYYCYYFRTVSGSSMRYWGQGTLVTVSS |
| 114 | 1C08 | EVQLVESGGGLVQPGGSLTLSCVASGSTSRINAMGWYRRAPGKQRELPAGISSDGSKVYAV |
| | | SVKGRFTISRDNAKNSVYLQMNSLRAEDTAVYYCYYFRTVSGSPMRYWGQGTLVTVSS |
| 115 | 1C010 | EVQLVESGGGLVQPGGSLTLSCVASGSTSRINAMGWYRRAPGKQRELVAGVSSDGSKVYAD |
| | | SVKGRFTISRDNAKNSVYLQMNSLRAEDTAVYYCYYFRTVSGSSMSYWGQGTLVTVSS |
| 116 | 1C011 | EVQLVESGGGLVQPGGSLTLSCVASGTTSSINAMGWYRRAPGKQRELVAGISSDGSKVYED |
| | | SVKGRFTISRDNAKNSVYLQMNSLRAEDTAVYYCYYFRTVSGSSMRYWGQGTLVTVSS |
| 117 | 1C012 | EVQLVESGGGLVQPGGSLTLSCVASGITSSINAMGWYRRAPGKQRELVAGISSDGSKVYAG |
| | | SVKGRFTISRDNAKNSVYLQMNSLRAEDTAVYYCYYFRTVRGSSMRYWGQGTLVTVSS |
| 118 | 1D01 | EVQLVESGGGLVQPGGSLTLSCVASGSTSDINAMGWYRRAPGKQRELVAGISSDKSKVYAD |
| | | SVKGRFTISRDNAKNSVYLQMNSLRAEDTAVYYCYYFRTVRGSSMRYWGQGTLVTVSS |
| 119 | 1D02 | EVQLVESGGGLVQPGGSLTLSCVASGSTSSINAMAWYRRAPGKQRELVAGISSNGSKVYAD |
| | | SVKGRFTISRDNAKNSVYLQMNSLRAEDTAVYYCYYFRQVSGSSMRYWGQGTLVTVSS |
| 120 | 1D03 | EVQLVESGGGLVQPGGSLTLSCVASGSTSSINAIGWYRRAPGKQRELVAGISSDGSKVLAD |
| | | SVKGRFTISRDNAKNSVYLQMNSLRAEDTAVYYCYYFRIVSGSSMGYWGQGTLVTVSS |
| 121 | 1D04 | EVQLVESGGGLVQPGGSLTLSCVASGSTSSKNAMGWYRRAPGKQRELVAGISSDGSKVYAD |
| | | SVKGRFTISRDNAKNSVYLQMNSLRAEDTAVYYCYYFRTVSGASMRYWGQGTLVTVSS |
| 122 | 1D06 | EVQLVESGGGLVQPGGSLTLSCVASGSTSSINAMGWYRRAPGKQRELVAGISSDNSKVYAD |
| | | SVKGRFTISRDNAKNSVYLQMNSLRAEDTAVYYCYYFRTVHGSSMRYWGQGTLVTVSS |
| 123 | 1D08 | EVQLVESGGGLVQPGGSLTLSCVASGLTSSINAMGWYRRAPGKQRELVAGISSDGSKVYAD |
| | | SVKGRFTISRDNAKNSVYLQMNSLRAEDTAVYYCYYFRMVSGSSMRYWGQGTLVTVSS |
| 124 | 1D09 | EVQLVESGGGLVQPGGSLTLSCVASGSTSSINAMAWYRRAPGKQRELVAGISSDGSKVYTD |
| | | SVKGRFTISRDNAKNSVYLQMNSLRAEDTAVYYCYYFRTISGSSMRYWGQGTLVTVSS |
| 125 | 1D010 | EVQLVESGGGLVQPGGSLTLSCVASGSTSSNNAMAWYRRAPGKQRELVAGISSDGSKVYTD |
| | | SVKGRFTISRDNAKNSVYLQMNSLRAEDTAVYYCYYFRTRSGSSMRYWGQGTLVTVSS |
| 126 | 1D011 | EVQLVESGGGLVQPGGSLTLSCVASGSTSSINAMAWYRRAPGKQRELVAGISSDNSKVYAD |
| | | SVKGRFTISRDNAKNSVYLQMNSLRAEDTAVYYCYYFRTVSGHSMRYWGQGTLVTVSS |
| 127 | 1D012 | EVQLVESGGGLVQPGGSLTLSCVASGSTSHINAMGWYRRAPGKQRELVAGISSDGSRVYAD |
| | | SVKGRFTISRDNAKNSVYLQMNSLRAEDTAVYYCYYFRTVSGGSMRYWGQGTLVTVSS |
| 128 | 1E02 | EVQLVESGGGLVQPGGSLTLSCVASGQTSSINAMGWYRRAPGKQRELVAGISSDGSQVYAD |
| | | SVKGRFTISRDNAKNSVYLQMNSLRAEDTAVYYCYYFRTKSGSSMRYWGQGTLVTVSS |
| 129 | 1E04 | EVQLVESGGGLVQPGGSLTLSCVASGSTSRINGMGWYRRAPGKQRELPAGISSDGSKAYAD |
| | | SVKGRFTISRDNAKNSVYLQMNSLRAEDTAVYYCYYFRTASGTSMRYWGQGTLVTVSS |
| 130 | 1E05 | EVQLVESGGGLVQPGGSLTLSCVASGSTSVINAMAWYRRAPGKQRELAAGISSDGSKVYAK |
| | | SAKGRFTISRDNAKNSVYLQMNSLRAEDTAVYYCYYENTVSGSSMRYWGQGTLVTVSS |
| 131 | 1E07 | EVQLVESGGGLVQPGGSLTLSCVASGSTSSINAMAWYRRAPGKQRELVAGISSDGSKVYND |
| | | SVKGRFTISRDNAKNSVYLQMNSLRAEDTAVYYCYYFRTVRGSSQRYWGQGTLVTVSS |
| 132 | 1E08 | EVQLVESGGGLVQPGGSLTLSCVASGKTSSINAMGWYRRAPGKQRELVAGISSDGSKVIAD |
| | | SVKGRFTISRDNAKNSVYLQMNSLRAEDTAVYYCYYFRTVLGSSMRYWGQGTLVTVSS |
| 133 | 1E09 | EVQLVESGGGLVQPGGSLTLSCVASGSTSSINAMAWYRRAPGKQRELVAGISSDGSKVYTD |
| | | SVKGRFTISRDNAKNSVYLQMNSLRAEDTAVYYCYYFRTRSGSSMRYWGQGTLVTVSS |
| 134 | 1E010 | EVQLVESGGGLVQPGGSLTLSCVASGSVSSINAMGWYRRAPGKQRELVAGISSDGSKVYID |
| | | SVKGRFTISRDNAKNSVYLQMNSLRAEDTAVYYCYYFRTVSGLSMRYWGQGTLVTVSS |
| 135 | 1E011 | EVQLVESGGGLVQPGGSLTLSCVASGNTSSINAMGWYRRAPGKQRELVAGISSDGSKVYYD |
| | | SVKGRFTISRDNAKNSVYLQMNSLRAEDTAVYYCYYFRTVRGSSQRYWGQGTLVTVSS |
| 136 | 1E012 | EVQLVESGGGLVQPGGSLTLSCVASGSTSSTNAMGWYRRAPGKQRELVAGISSDGSKVYVD |
| | | SVKGRFTISRDNAKNSVYLQMNSLRAEDTAVYYCYYFRTVSGSSMVYWGQGTLVTVSS |
| 137 | 1F01 | EVQLVESGGGLVQPGGSLTLSCVASGSTSSINAMGWYRRAPGKQRELVAGISSDGSKVYGD |
| | | SVKGRFTISRDNAKNSVYLQMNSLRAEDTAVYYCYYFRTVSRSSMRYWGQGTLVTVSS |
| 138 | 1F02 | EVQLVESGGGLVQPGGSLTLSCVASGSTSSINAMAWYRRAPGKQRELAAGISSDQSKVYAD |
| | | SAKGRFTISRDNAKNSVYLQMNSLRAEDTAVYYCYYFRTVSGSSMSYWGQGTLVTVSS |
| 139 | 1F04 | EVQLVESGGGLVQPGGSLTLSCVASGGTSSINAMGWYRRAPGKQRELVAGISSDGSKVYSD |
| | | SVKGRFTISRDNAKNSVYLQMNSLRAEDTAVYYCYYFRTVSGSSARYWGQGTLVTVSS |
| 140 | 1F05 | EVQLVESGGGLVQPGGSLTLSCVASGSTRSINAMGWYRRAPGKQRELVAGISSDGSKVYAD |
| | | SVKGRFTISRDNAKNSVYLQMNSLRAEDTAVYYCYYFHTVSGSSMRYWGQGTLVTVSS |
| 141 | 1F06 | EVQLVESGGGLVQPGGSLTLSCVASGTTSSINAMGWYRRAPGKQRELVAGISSDGSKVIAD |
| | | SVKGRFTISRDNAKNSVYLQMNSLRAEDTAVYYCYYFRTVLGSSMRYWGQGTLVTVSS |
| 142 | 1F07 | EVQLVESGGGLVQPGGSLTLSCVASGSTSSINAMGWYRRAPGKQRELVAGISSDGSKVDAD |
| | | SVKGRFTISRDNAKNSVYLQMNSLRAEDTAVYYCYYFRTVSGSSMRYWGQGTLVTVSS |
| 143 | 1F08 | EVQLVESGGGLVQPGGSLTLSCVASGSTSSINAMAWYRRAPGKQRELVAGISSDGSKVYKD |
| | | SVKGRFTISRDNAKNSVYLQMNSLRAEDTAVYYCYYFRNVSGSSMRYWGQGTLVTVSS |
| 144 | 1F09 | EVQLVESGGGLVQPGGSLTLSCVASGNTSSINAMGWYRRAPGKQRELVAGISSNGSKVYAD |
| | | SVKGRFTISRDNAKNSVYLQMNSLRAEDTAVYYCYYFRTVTGSSMRYWGQGTLVTVSS |
| 145 | 1F010 | EVQLVESGGGLVQPGGSLTLSCVASGSTSRINAMGWYRRAPGKQRELVAGISSDGSKVYKD |
| | | SVKGRFTISRDNAKNSVYLQMNSLRAEDTAVYYCYYFRTVSGSSMRYWGQGTLVTVSS |
| 146 | 1F011 | EVQLVESGGGLVQPGGSLTLSCVASGSTSSINAIGWYRRAPGKQRELVAGISSDGSKVYAD |
| | | SVKGRFTISRDNAKNSVYLQMNSLRAEDTAVYYCYYFRTVKGSSMRYWGQGTLVTVSS |
| 147 | 1F012 | EVQLVESGGGLVQPGGSLTLSCVASGLTSSINAMGWYRRAPGKQRELVAGISSDGSKVYQD |
| | | SVKGRFTISRDNAKNSVYLQMNSLRAEDTAVYYCYYFRTNSGSSMRYWGQGTLVTVSS |
| 148 | 1G01 | EVQLVESGGGLVQPGGSLTLSCVASGSTSSINAMAWYRRAPGKQRELVAGISSDGSKVYAE |
| | | SVKGRFTISRDNAKNSVYLQMNSLRAEDTAVYYCYYFRTVSGASMRYWGQGTLVTVSS |
| 149 | 1G04 | EVQLVESGGGLVQPGGSLTLSCVASGSTSSTNAMGWYRRAPGKQRELVAGISSDGSKVLAD |
| | | SVKGRFTISRDNAKNSVYLQMNSLRAEDTAVYYCYYFRTVNLSSMRYWGQGTLVTVSS |
| 150 | 1G05 | EVQLVESGGGLVQPGGSLTLSCVASGSTSSINAIGWYRRAPGKQRELVAGISSDGSKYYAD |
| | | SVKGRFTISRDNAKNSVYLQMNSLRAEDTAVYYCYYFRTVTGSSMRYWGQGTLVTVSS |
| 151 | 1G06 | EVQLVESGGGLVQPGGSLTLSCVASGSTSSINAIGWYRRAPGKQRELVAGISSDGSKVYAV |
| | | SVKGRFTISRDNAKNSVYLQMNSLRAEDTAVYYCYYFRKVSGSSARYWGQGTLVTVSS |
| 152 | 1G07 | EVQLVESGGGLVQPGGSLTLSCVASGSTSSINAMGWYRRAPGKQRELVAGISSDGSKVVAD |
| | | SVKGRFTISRDNAKNSVYLQMNSLRAEDTAVYYCYYFRTYSGSSMRYWGQGTLVTVSS |
| 153 | 1G09 | EVQLVESGGGLVQPGGSLTLSCVASGSTSSINAMGWYRRAPGKQRELVAGISSDGSKVYAD |
| | | SVKGRFTISRDNAKNSVYLQMNSLRAEDTAVYYCYYFRTVSKSSMRYWGQGTLVTVSS |
| 154 | 1G011 | EVQLVESGGGLVQPGGSLTLSCVASGSTSSINAMAWYRRAPGKQRELVAGISSDGSKVYAD |
| | | SVKGRFTISRDNAKNSVYLQMNSLRAEDTAVYYCYYFKTVSGSSMRYWGQGTLVTVSS |
| 155 | 1H01 | EVQLVESGGGLVQPGGSLTLSCVASGSTSSINAMAWYRRAPGKQRELAAGISSDNSKVYAD |
| | | SVKGRFTISRDNAKNSVYLQMNSLRAEDTAVYYCYYFRTRSGSSMRYWGQGTLVTVSS |
| 156 | 1H02 | EVQLVESGGGLVQPGGSLTLSCVASGSKSSINAMGWYRRAPGKQRELAAGISSDGSKVYAQ |
| | | SVKGRFTISRDNAKNSVYLQMNSLRAEDTAVYYCYYFRTSSGSSMRYWGQGTLVTVSS |
| 157 | 1H06 | EVQLVESGGGLVQPGGSLTLSCVASGTTSSINAMGWYRRAPGKQRELVAGISSDGSKVYVD |
| | | SVKGRFTISRDNAKNSVYLQMNSLRAEDTAVYYCYYFRFLSGSSMRYWGQGTLVTVSS |
| 158 | 1H07 | EVQLVESGGGLVQPGGSLTLSCVASGSTSSINAFGWYRRAPGKQRELVAGISSDGSKVYSD |
| | | SVKGRFTISRDNAKNSVYLQMNSLRAEDTAVYYCYYFRTVSGSSMRYWGQGTLVTVSS |
| 159 | 1H08 | EVQLVESGGGLVQPGGSLTLSCVASGSTESINAMGWYRRAPGKQRELVAGISSDGSKVLAD |
| | | SVKGRFTISRDNAKNSVYLQMNSLRAEDTAVYYCYYERLVSGSSMRYWGQGTLVTVSS |
| 160 | 1H010 | EVQLVESGGGLVQPGGSLTLSCVASGSTRSINAMGWYRRAPGKQRELVAGISSDGSKVYND |
| | | SVKGRFTISRDNAKNSVYLQMNSLRAEDTAVYYCYYFRTVSGSSMRFWGQGTLVTVSS |
| 161 | 1H011 | EVQLVESGGGLVQPGGSLTLSCVASGSTSSINAIGWYRRAPGKQRELVAGISSDGSKVYND |
| | | SVKGRFTISRDNAKNSVYLQMNSLRAEDTAVYYCYYFRTQSGSSMRYWGQGTLVTVSS |
| 162 | 1H012 | EVQLVESGGGLVQPGGSLTLSCVASGSTSSINAMGWYRRAPGKQRELVAGISSDGSKVYVD |
| | | SVKGRFTISRDNAKNSVYLQMNSLRAEDTAVYYCYYFRTVSGSSMPYWGQGTLVTVSS |
| 163 | 2A01 | EVQLVESGGGLVQPGGSLTLSCVASGSTSSINAMGWYRRAPGKQRELVAGISSDGSKVVAD |
| | | SVKGRFTISRDNAKNSVYLQMNSLRAEDTAVYYCYYFRTLSGSSMRYWGQGTLVTVSS |
| 164 | 2A03 | EVQLVESGGGLVQPGGSLTLSCVASGTTSSINAMGWYRRAPGKQRELVAGISSDGSKVYGD |
| | | SVKGRFTISRDNAKNSVYLQMNSLRAEDTAVYYCYYFRTVSGSAMRYWGQGTLVTVSS |
| 165 | 2A04 | EVQLVESGGGLVQPGGSLTLSCVASGSTSSINAMAWYRRAPGKQRELVAGISSDGSKVYTD |
| | | SVKGRFTISRDNAKNSVYLQMNSLRAEDTAVYYCYYFRTTSGSSMRYWGQGTLVTVSS |
| 166 | 2A05 | EVQLVESGGGLVQPGGSLTLSCVASGRTSSINAMGWYRRAPGKQRELVAGISSDGSKVYND |
| | | SVKGRFTISRDNAKNSVYLQMNSLRAEDTAVYYCYYFRTVSGTSMRYWGQGTLVTVSS |
| 167 | 2A06 | EVQLVESGGGLVQPGGSLTLSCVASGSTSSRNAMGWYRRAPGKQRELVAGISSDGSKVTAD |
| | | SVKGRFTISRDNAKNSVYLQMNSLRAEDTAVYYCYYFRTRSGSSMRYWGQGTLVTVSS |
| 168 | 2A08 | EVQLVESGGGLVQPGGSLTLSCVASGSTKSINAMGWYRRAPGKQRELVAGISSDGSKVYRD |
| | | SVKGRFTISRDNAKNSVYLQMNSLRAEDTAVYYCYYFRTSSGSSMRYWGQGTLVTVSS |
| 169 | 2A09 | EVQLVESGGGLVQPGGSLTLSCVASGSTSSRNAMGWYRRAPGKQRELVAGISSNGSKVYSD |
| | | SVKGRFTISRDNAKNSVYLQMNSLRAEDTAVYYCYYFRTVSGSSMSYWGQGTLVTVSS |
| 170 | 2A011 | EVQLVESGGGLVQPGGSLTLSCVASGSTSSINAIGWYRRAPGKQRELVAGISSDGSKVYSD |
| | | SVKGRFTISRDNAKNSVYLQMNSLRAEDTAVYYCYYFRPVSGSSMRYWGQGTLVTVSS |
| 171 | 2B01 | EVQLVESGGGLVQPGGSLTLSCVASGSTSLINAMGWYRRAPGKQRELVAGISSDGSKVYAD |
| | | SVKGRFTISRDNAKNSVYLQMNSLRAEDTAVYYCYYFRHVSGSSMRYWGQGTLVTVSS |
| 172 | 2B02 | EVQLVESGGGLVQPGGSLTLSCVASGSTSSINAMAWYRRAPGKQRELVAGISSDGSKVYAD |
| | | SVKGRFTISRDNAKNSVYLQMNSLRAEDTAVYYCYYFRTKSGSSMRYWGQGTLVTVSS |
| 173 | 2B03 | EVQLVESGGGLVQPGGSLTLSCVASGSTSSINAMGWYRRAPGKQRELVAGISSDGSLVYAD |
| | | SVKGRFTISRDNAKNSVYLQMNSLRAEDTAVYYCYYFTTVSGSSMRYWGQGTLVTVSS |
| 174 | 2B05 | EVQLVESGGGLVQPGGSLTLSCVASGTTSSINAMGWYRRAPGKQRELVAGISSDGTKVYAD |
| | | SVKGRFTISRDNAKNSVYLQMNSLRAEDTAVYYCYYFHTVSGSSMRYWGQGTLVTVSS |
| 175 | 2B07 | EVQLVESGGGLVQPGGSLTLSCVASGSTSSINAFGWYRRAPGKQRELVAGISSDGSKVYAD |
| | | SVKGRFTISRDNAKNSVYLQMNSLRAEDTAVYYCYYFRTVRGSSMRYWGQGTLVTVSS |
| 176 | 2B010 | EVQLVESGGGLVQPGGSLTLSCVASGSTSSRNAMGWYRRAPGKQRELVAGISSDGSKLYLD |
| | | SVKGRFTISRDNAKNSVYLQMNSLRAEDTAVYYCYYFRTVLGSSMRYWGQGTLVTVSS |
| 177 | 2B011 | EVQLVESGGGLVQPGGSLTLSCVASGNTSSINAMGWYRRAPGKQRELVAGISSDGSRVYAD |
| | | SVKGRFTISRDNAKNSVYLQMNSLRAEDTAVYYCYYFRTVSGSSMRSWGQGTLVTVSS |
| 178 | 2B012 | EVQLVESGGGLVQPGGSLTLSCVASGTTSSINAMGWYRRAPGKQRELVAGISSDGSKVYND |
| | | SVKGRFTISRDNAKNSVYLQMNSLRAEDTAVYYCYYFRTVRGSSMRYWGQGTLVTVSS |
| 179 | 2C01 | EVQLVESGGGLVQPGGSLTLSCVASGSTASINAMGWYRRAPGKQRELVAGISSDGSKVYAD |
| | | SVKGRFTISRDNAKNSVYLQMNSLRAEDTAVYYCYYFRYVSGSSMRYWGQGTLVTVSS |
| 180 | 2C02 | EVQLVESGGGLVQPGGSLTLSCVASGSTSSINAVGWYRRAPGKQRELVAGISSDGSKVYVD |
| | | SVKGRFTISRDNAKNSVYLQMNSLRAEDTAVYYCYYFRTVYGSSMRYWGQGTLVTVSS |
| 181 | 2C04 | EVQLVESGGGLVQPGGSLTLSCVASGSTSSRNAMGWYRRAPGKQRELVAGISSDGSKLYAD |
| | | SVKGRFTISRDNAKNSVYLQMNSLRAEDTAVYYCYYFRTVLGSSMRYWGQGTLVTVSS |
| 182 | 2C06 | EVQLVESGGGLVQPGGSLTLSCVASGSTNSINAMGWYRRAPGKQRELVAGISSDGSKVYKD |
| | | SVKGRFTISRDNAKNSVYLQMNSLRAEDTAVYYCYYYRTVSGSSMRYWGQGTLVTVSS |
| 183 | 2C07 | EVQLVESGGGLVQPGGSLTLSCVASGSTSSINAMAWYRRAPGKQRELVAGISSDGSKVYAD |
| | | SVKGRFTISRDNAKNSVYLQMNSLRAEDTAVYYCYYFRSVSGSSMRYWGQGTLVTVSS |
| 184 | 2C08 | EVQLVESGGGLVQPGGSLTLSCVASGSTSRINAMGWYRRAPGKQRELVAGISSDGSKVYQD |
| | | SVKGRFTISRDNAKNSVYLQMNSLRAEDTAVYYCYYFRRVSGSSMRYWGQGTLVTVSS |
| 185 | 2C09 | EVQLVESGGGLVQPGGSLTLSCVPSGSTSNINAMGWYRRAPGKQRELPAGISSDGTKIYAD |
| | | SAKVPFTITRDNAKNSVYLQMNSLRAEDTAVYYCYYFRTVSGTSMRYWGQGTLVTVSS |
| 186 | 2C010 | EVQLVESGGGLVQPGGSLTLSCVASGSTSKINAMGWYRRAPGKQRELVAGISSDRSKVYAD |
| | | SVKGRFTISRDNAKNSVYLQMNSLRAEDTAVYYCYYFRTVAGSSMRYWGQGTLVTVSS |
| 187 | 2D02 | EVQLVESGGGLVQPGGSLTLSCVASGSTSSINALGWYRRAPGKQRELVAGISSDGSLVYAD |
| | | SVKGRFTISRDNAKNSVYLQMNSLRAEDTAVYYCYYFRIVSGSSMRYWGQGTLVTVSS |
| 188 | 2D03 | EVQLVESGGGLVQPGGSLTLSCVASGKTSSINAMGWYRRAPGKQRELVAGISSDGSKVYAD |
| | | SVKGRFTISRDNAKNSVYLQMNSLRAEDTAVYYCYYFRTVSGVSMRYWGQGTLVTVSS |
| 189 | 2D04 | EVQLVESGGGLVQPGGSLTLSCVASGSTSSINAVGWYRRAPGKQRELVAGISSDGSKVYRD |
| | | SVKGRFTISRDNAKNSVYLQMNSLRAEDTAVYYCYYFRTVQGSSMRYWGQGTLVTVSS |
| 190 | 2D05 | EVQLVESGGGLVQPGGSLTLSCVASGSTSRINAMGWYRRAPGKQRELVAGISSDGSKVYAD |
| | | SVKGRFTISRDNAKNSVYLQMNSLRAEDTAVYYCYYFRTASGSSMRYWGQGTLVTVSS |
| 191 | 2D06 | EVQLVESGGGLVQPGGSLTLSCVASGSTSSINAMGWYRRAPGKQRELVAGISSDGSKVYSD |
| | | SVKGRFTISRDNAKNSVYLQMNSLRAEDTAVYYCYYFRTVSGSSSRYWGQGTLVTVSS |
| 192 | 2D07 | EVQLVESGGGLVQPGGSLTLSCVASGSTSSINAVGWYRRAPGKQRELVAGISSDGTKVYRD |
| | | SVKGRFTISRDNAKNSVYLQMNSLRAEDTAVYYCYYFRTVQGSSMRYWGQGTLVTVSS |
| 193 | 2D09 | EVQLVESGGGLVQPGGSLTLSCVASGTTSSINAMGWYRRAPGKQRELAAGISSDGSKVYND |
| | | SVKGRFTISRDNAKNSVYLQMNSLRAEDTAVYYCYYFRTVRGSSMRYWGQGTLVTVSS |
| 194 | 2D010 | EVQLVESGGGLVQPGGSLTLSCVASGSTSSINAMGWYRRAPGKQRELVAGISSDGSKVYAD |
| | | SVKGRFTISRDNAKNSVYLQMNSLRAEDTAVYYCYYFRTKSGSSMRYWGQGTLVTVSS |
| 195 | 2D011 | EVQLVESGGGLVQPGGSLTLSCVASGTTSSINAMGWYRRAPGKQRELVAGISSDGSKVYAD |
| | | SVKGRFTISRDNAKNSVYLQMNSLRAEDTAVYYCYYFRTVWGSSMRYWGQGTLVTVSS |
| 196 | 2D012 | EVQLVESGGGLVQPGGSLTLSCVASGKTSSINAMGWYRRAPGKQRELVAGISSDGSKVYTD |
| | | SVKGRFTISRDNAKNSVYLQMNSLRAEDTAVYYCYYFRTRSGSSMRYWGQGTLVTVSS |
| 197 | 2E01 | EVQLVESGGGLVQPGGSLTLSCVASGSTSSINAMGWYRRAPFKQGELPAGISPDGTKAYAD |
| | | SAKVRFTISRDNAKNSVYLQMNSLRAEDTAVYYCYYFHTVCGTSMGYWGQGTLVTVSS |
| 198 | 2E02 | EVQLVESGGGLVQPGGSLTLSCVASGSTSAINAMGWYRRAPGKQRELVAGISSDGSKVYVD |
| | | SVKGRFTISRDNAKNSVYLQMNSLRAEDTAVYYCYYFRTVSGSSQRYWGQGTLVTVSS |
| 199 | 2E05 | EVQLVESGGGLVQPGGSLTLSCVASGSPSSINAYGWYRRAPGKQRELVAGISSDGSKVYSD |
| | | SVKGRFTISRDNAKNSVYLQMNSLRAEDTAVYYCYYFRTVSGSSMSYWGQGTLVTVSS |
| 200 | 2E06 | EVQLVESGGGLVQPGGSLTLSCVASGSTSSINAMGWYRRAPGKQRELVAGISSDGSKVYAS |
| | | SVKGRFTISRDNAKNSVYLQMNSLRAEDTAVYYCYYFRTVRGSSMRYWGQGTLVTVSS |
| 201 | 2E08 | EVQLVESGGGLVQPGGSLTLSCVASGSRSSINAMGWYRRAPGKQRELVAGISADGSKVYAD |
| | | SVKGRFTISRDNAKNSVYLQMNSLRAEDTAVYYCYYFRTQSGSSMRYWGQGTLVTVSS |
| 202 | 2E09 | EVQLVESGGGLVQPGGSLTLSCVASGSVSSINAMGWYRRAPGKQRELVAGISSDGSKVYAS |
| | | SAKGRFTISRDNAKNSVYLQMNSLRAEDTAVYYCYYFRTLSGSSMRYWGQGTLVTVSS |
| 203 | 2E010 | EVQLVESGGGLVQPGGSLTLSCVASGSTSSINAMAWYRRAPGKQRELVAGISSDGSKVYAD |
| | | SVKGRFTISRDNAKNSVYLQMNSLRAEDTAVYYCYYFHTVSGSSMRYWGQGTLVTVSS |
| 204 | 2E011 | EVQLVESGGGLVQPGGSLTLSCVASGSTSSINAIGWYRRAPGKQRELVAGISSDGSSVYAD |
| | | SVKGRFTISRDNAKNSVYLQMNSLRAEDTAVYYCYYERRVSGSSMRYWGQGTLVTVSS |
| 205 | 2F01 | EVQLVESGGGLVQPGGSLTLSCVASGSTSSINAMGWYRRAPGKQRELVAGISSDGSKVYSD |
| | | SVKGRFTISRDNAKNSVYLQMNSLRAEDTAVYYCYYERLVSGSSMRYWGQGTLVTVSS |
| 206 | 2F02 | EVQLVESGGGLVQPGGSLTLSCVASGSTSSINAVGWYRRAPGKQRELVAGISSDGSKVYAG |
| | | SVKGRFTISRDNAKNSVYLQMNSLRAEDTAVYYCYYFRTVSGSYMRYWGQGTLVTVSS |
| 207 | 2F03 | EVQLVESGGGLVQPGGSLTLSCVASGSTSSINAMAWYRRAPGKQRELAAGISSDNSKVYAD |
| | | SVKGREFTISRDNAKNSVYLQMNSLRAEDTAVYYCYYFRTVGGSSMRYWGQGTLVTVSS |
| 208 | 2F06 | EVQLVESGGGLVQPGGSLTLSCVASGSTSSINAYGWYRRAPGKQRELVAGISSDGSAVYAD |
| | | SVKGRFTISRDNAKNSVYLQMNSLRAEDTAVYYCYYFRTHSGSSMRYWGQGTLVTVSS |
| 209 | 2F07 | EVQLVESGGGLVQPGGSLTLSCVASGSTSSINAVGWYRRAPGKQRELVAGISSDGSSVYAD |
| | | SVKGRFTISRDNAKNSVYLQMNSLRAEDTAVYYCYYFRTVSTSSMRYWGQGTLVTVSS |
| 210 | 2F08 | EVQLVESGGGLVQPGGSLTLSCVASGSKSSINAMGWYRRAPGKQRELPAGISSNGTKVYAD |
| | | SAKVRFTISRDNAKNSVYLQMNSLRAEDTAVYYCYYFRTVLGTSMRYWGQGTLVTVSS |
| 211 | 2F09 | EVQLVESGGGLVQPGGSLTLSCVASGSTSSINAMAWYRRAPGKQRELVAGISSDGSKLYAD |
| | | SVKGRFTISRDNAKNSVYLQMNSLRAEDTAVYYCYYFRTVSGSSMRYWGQGTLVTVSS |
| 212 | 2F11 | EVQLVESGGGLVQPGGSLTLSCVASGSVSSINAMGWYRRAPGKQRELVAGISSDGSKVYKD |
| | | SVKGRFTISRDNAKNSVYLQMNSLRAEDTAVYYCYYFRTVSGSSMGYWGQGTLVTVSS |
| 213 | 2G03 | EVQLVESGGGLVQPGGSLTLSCVASGSTSSINAMGWYRRAPGKQRELVAGISSDGSLVYAD |
| | | SVKGRFTISRDNAKNSVYLQMNSLRAEDTAVYYCYYFRTVSGSSMRAWGQGTLVTVSS |
| 214 | 2G04 | EVQLVESGGGLVQPGGSLTLSCVASGSTSSINAMGWYRRAPGKQRELVAGISSDGSLVYAD |
| | | SVKGRFTISRDNAKNSVYLQMNSLRAEDTAVYYCYYFRILSGSSMRYWGQGTLVTVSS |
| 215 | 2G07 | EVQLVESGGGLVQPGGSLTLSCVASGSTSSINAMAWYRRAPGKQRELVAGISSDGSKVYAD |
| | | SVKGRFTISRDNAKNSVYLQMNSLRAEDTAVYYCYYFRTVQGSSMRYWGQGTLVTVSS |
| 216 | 2G08 | EVQLVESGGGLVQPGGSLTLSCVASGSTSYINAMGWYRRAPGKQRELVAGISSDGSKVYAD |
| | | SVKGRFTISRDNAKNSVYLQMNSLRAEDTAVYYCYYFRTVSGQSMGYWGQGTLVTVSS |
| 217 | 2G09 | EVQLVESGGGLVQPGGSLTLSCVASGSTSSINAMGWYRRAPGKQRELVAGVSSDGSKVYAD |
| | | SVKGRFTISRDNAKNSVYLQMNSLRAEDTAVYYCYYFRTVSGSSARYWGQGTLVTVSS |
| 218 | 2G011 | EVQLVESGGGLVQPGGSLTLSCVASGSTSSINAMGWYRRAPGKQRELPAGISRDGSKVYAD |
| | | SVKGRFTISRDNAKNSVYLQMNSLRAEDTAVYYCYYFRYVSGSSMRYWGQGTLVTVSS |
| 219 | 2H010 | EVQLVESGGGLVQPGGSLTLSCVASGSTSSINAMGWYRRAPGKQRELAAGISSDGSKLYAD |
| | | SVKGRFTISRDNAKNSVYLQMNSLRAEDTAVYYCYYFRTVSGSSMRYWGQGTLVTVSS |
| 220 | 2H011 | EVQLVESGGGLVQPGGSLTLSCVASGSTSRINAMGWYRRAPGKQRELVAGISSDGSKVYAD |
| | | SVKGRFTISRDNAKNSVYLQMNSLRAEDTAVYYCYYFRRVSGSSMRYWGQGTLVTVSS |
| 221 | 2H02 | EVQLVESGGGLVQPGGSLTLSCVASGSTSSINAMAWYRRAPGKQRELAAGISSDGSKVYAD |
| | | SVKGRFTISRDNAKNSVYLQMNSLRAEDTAVYYCYYFHTVSGSSMRYWGQGTLVTVSS |
| 222 | 2H03 | EVQLVESGGGLVQPGGSLTLSCVASGSTSSINAMAWYRRAPGKQRELVAGISSDGSKVYAD |
| | | SVKGRFTISRDNAKNSVYLQMNSLRAEDTAVYYCYYFRQVSGSSMRYWGQGTLVTVSS |
| 223 | 2H04 | EVQLVESGGGLVQPGGSLTLSCVASGSTSSINAMGWYRRAPGKQRELVAGISSDTSKVYAD |
| | | SVKGRFTISRDNAKNSVYLQMNSLRAEDTAVYYCYYFRTVSGSYMRYWGQGTLVTVSS |
| 224 | 2H06 | EVQLVESGGGLVQPGGSLTLSCVASGSTSTINAMGWYRRAPGKQRELVAGISSDGSKVYAD |
| | | SVKGRFTISRDNAKNSVYLQMNSLRAEDTAVYYCYYFRTASGSSMRYWGQGTLVTVSS |
| 225 | 2H07 | EVQLVESGGGLVQPGGSLTLSCVASGSTSSINAVGWYRRAPGKQRELVAGISSDGSTVYAD |
| | | SVKGRFTISRDNAKNSVYLQMNSLRAEDTAVYYCYYFRTVSGHSMRYWGQGTLVTVSS |
| 226 | 2H08 | EVQLVESGGGLVQPGGSLTLSCVASGSTSSINAMGWYRRAPGKQRELAAGISKDGSKVYAD |
| | | SAKGRFTISRDNAKNSVYLQMNSLRAEDTAVYYCYYFRTVSGSSSRYWGQGTLVTVSS |
| 227 | 2E05- | EVQLVESGGGLVQPGGSLTLSCVASGSPSSINAYGWYRRAPGKQRELVAGISSDGSKVYSD |
| | M106Y | SVKGRFTISRDNAKNSVYLQMNSLRAEDTAVYYCYYFRTVSGSSYSYWGQGTLVTVSS |
| 228 | 2E05- | EVQLVESGGGLVQPGGSLTLSCVASGSPSSINAYGWYRRAPGKQRELVAGISSDGSKVYSD |
| | M106Q | SVKGRFTISRDNAKNSVYLQMNSLRAEDTAVYYCYYFRTVSGSSQSYWGQGTLVTVSS |
| 229 | 3A01 | EVQLVESGGGLVQPGGSLTLSCAASGSSVKFLSMAWYRQAPGKKRELVAGISADGSTDYID |
| | | SVKGRFTISRDNAKNSVYLQMNSLRAEDTAVYYCYAYRWTRRYTYWGQGTLVTVSS |
| 230 | 3A02 | EVQLVESGGGLVQPGGSLTLSCAASGSSVSFLSLAWYRQAPGKKRELVAGISADGSTAYID |
| | | SVKGRFTISRDNAKNSVYLQMNSLRAEDTAVYYCYAYRWRTRYTYWGQGTLVTVSS |
| 231 | 3A03 | EVQLVESGGGLVQPGGSLTLSCAASGSRVSFLSMAWYRQAPGKKRELVAGISRDGSTDYID |
| | | SVKGRFTISRDNAKNSVYLQMNSLRAEDTAVYYCYAYRWTTRRTYWGQGTLVTVSS |
| 232 | 3A04 | EVQLVESGGGLVQPGGSLTLSCAASGSQVSFLSMAWYRQAPGKKRELVAGISRDGSTDYID |
| | | SVKGRFTISRDNAKNSVYLQMNSLRAEDTAVYYCYAYRWTTRYIYWGQGTLVTVSS |
| 233 | 3A05 | EVQLVESGGGLVQPGGSLTLSCAASGSSVSFLSMAWYRQAPGKKRELVAGISEAGSTDYID |
| | | SVKGRFTISRDNAKNSVYLQMNSLRAEDTAVYYCYAYRWRTRYTYWGQGTLVTVSS |
| 234 | 3A06 | EVQLVESGGGLVQPGGSLTLRCAASGSKVSFLSMAWYRQAPGKKRELVAGISADGSTDYVD |
| | | SVKGRFTISRDNAKNSVYLQMNSLRAEDTAVYYCYAYRWTRRYTYWGQGTLVTVSS |
| 235 | 3A08 | EVQLVESGGGLVQPGGSLTLSCAASGSSVGFLSMAWYRQAPGKKRELVAGISADGSTDYIR |
| | | SVKGRFTISRDNAKNSVYLQMNSLRAEDTAVYYCYAYRWRTRYTYWGQGTLVTVSS |
| 236 | 3A09 | EVQLVESGGGLVQPGGSLTLSCAASGSSVSFLSMAWYRQAPGKKRELVAGISADGSVDYID |
| | | SVKGRFTISRDNAKNSVYLQMNSLRAEDTAVYYCYAYRWTTRYIYWGQGTLVTVSS |
| 237 | 3A010 | EVQLVESGGGLVQPGGSLTLSCAASGSRVSFLSMAWYRQAPGKKRELVAGISADGSTLYID |
| | | SVKGRFTISRDNAKNSVYLQMNSLRAEDTAVYYCYAYRWTTRRTYWGQGTLVTVSS |
| 238 | 3A011 | EVQLVESGGGLVQPGGSLTLSCAASGSSVSFLSLAWYRQAPGKKRELVAGISTDGSTDYID |
| | | SVKGRFTISRDNAKNSVYLQMNSLRAEDTAVYYCYAYRWRTRYTYWGQGTLVTVSS |
| 239 | 3B01 | EVQLVESGGGLVQPGGSLTLSCAASGSSVSFLSMAWYRQAPGKKRELVAGISGDGSTDYID |
| | | SVKGRFTISRDNAKNSVYLQMNSLRAEDTAVYYCYAYRWTTRYTYWGQGTLVTVSS |
| 240 | 3B02 | EVQLVESGGGLVQPGGSLTLSCAASGSSVQFLSMAWYRQAPGKKRELVAGISADGSTDYIN |
| | | SVKGRFTISRDNAKNSVYLQMNSLRAEDTAVYYCYAYRWRTRYTYWGQGTLVTVSS |
| 241 | 3B04 | EVQLVESGGGLVQPGGSLTLSCAASGSNVSFLSMAWYRQAPGKKRELVAGISARGSTDYID |
| | | SVKGRFTISRDNAKNSVYLQMNSLRAEDTAVYYCYAYHWTTRYTYWGQGTLVTVSS |
| 242 | 3B05 | EVQLVESGGGLVQPGGSLTLSCVASGSSVKFLSMAWYRQAPGKKRELVAGISADGSTTYID |
| | | SVKGRFTISRDNAKNSVYLQMNSLRAEDTAVYYCYAYRWTTRRTYWGQGTLVTVSS |
| 243 | 3B06 | EVQLVESGGGLVQPGGSLTLSCAASGKSVSFLSMAWYRQAPGKKRELVAGISKDGSTDYID |
| | | SVKGRFTISRDNAKNSVYLQMNSLRAEDTAVYYCYAYRWTTRYTYWGQGTLVTVSS |
| 244 | 3B07 | EVQLVESGGGLVQPGGSLTLSCAASGSRVSFLSMAWYRQAPGKKRELVAGISADGSTTYID |
| | | SVKGRFTISRDNAKNSVYLQMNSLRAEDTAVYYCYAYRWTTRYTYWGQGTLVTVSS |
| 245 | 3B09 | EVQLVESGGGLVQPGGSLTLSCAASGSHVSFLSMAWYRQAPGKKRELVAGISANGSTDYID |
| | | SVKGRFTISRDNAKNSVYLQMNSLRAEDTAVYYCYAYRWTTRYAYWGQGTLVTVSS |
| 246 | 3B010 | EVQLVESGGGLVQPGGSLTLSCAASGSSVSFLSMAWYRQAPGKKRELVAGISRDGSTDYID |
| | | SVKGRFTISRDNAKNSVYLQMNSLRAEDTAVYYCYAYRWVTRYTYWGQGTLVTVSS |
| 247 | 3B011 | EVQLVESGGGLVQPGGSLTLSCAASGSSVSFLSMAWYRQAPGKKRELVAGISADGSADYID |
| | | SVKGRFTISRDNAKNSVYLQMNSLRAEDTAVYYCYAYRWVTRYTYWGQGTLVTVSS |
| 248 | 3C01 | EVQLVESGGGLVQPGGSLTLSCAASGSSVRFLSMAWYRQAPGKKRELVAGISAHGSTDYID |
| | | SVKGRFTISRDNAKNSVYLQMNSLRAEDTAVYYCYAYRWSTRYTYWGQGTLVTVSS |
| 249 | 3C02 | EVQLVESGGGLVQPGGSLTLSCAASGSSVRFLSMAWYRQAPGKKRELVAGISADGSTIYID |
| | | SVKGRFTISRDNAKNSVYLQMNSLRAEDTAVYYCYAYRWRTRYTYWGQGTLVTVSS |
| 250 | 3C03 | EVQLVESGGGLVQPGGSLTLSCAASGSSVRFLSMAWYRQAPGKKRELVAGISRDGSTVYID |
| | | SVKGRFTISRDNAKNSVYLQMNSLRAEDTAVYYCYAYRWTTRGTYWGQGTLVTVSS |
| 251 | 3C04 | EVQLVESGGGLVQPGGSLTLSCAASGSHVSFLSMAWYRQAPGKKRELVAGISADGPTDYID |
| | | SVKGRFTISRDNAKNSVYLQMNSLRAEDTAVYYCYAYRWDTRYTYWGQGTLVTVSS |
| 252 | 3C05 | EVQLVESGGGLVQPGGSLTLSCVASGTSVSFLSMAWYRQAPGKKRELVAGISADGSTTYID |
| | | SVKGRFTISRDNAKNSVYLQMNSLRAEDTAVYYCYAYRWTTRRTYWGQGTLVTVSS |
| 253 | 3C06 | EVQLVESGGGLVQPGGSLTLSCAASGTSVSFLSIAWYRQAPGKKRELVAGISADGSTDYIA |
| | | SVKGRFTISRDNAKNSVYLQMNSLRAEDTAVYYCYAYRWRTRYTYWGQGTLVTVSS |
| 254 | 3C08 | EVQLVESGGGLVQPGGSLTLSCAASGSSVKFLSMAWYRQAPGKKRELVAGISLDGSTDYID |
| | | SVKGRFTISRDNAKNSVYLQMNSLRAEDTAVYYCYAYRWTGRYTYWGQGTLVTVSS |
| 255 | 3C09 | EVQLVESGGGLVQPGGSLTLSCAASGSSVSFLSMAWYRQAPGKKRELVAGISADGSTIYID |
| | | SVKGRFTISRDNAKNSVYLQMNSLRAEDTAVYYCYAYRWRTRYTYWGQGTLVTVSS |
| 256 | 3C011 | EVQLVESGGGLVQPGGSLTLSCAASGSSVRFLSMAWYRQAPGKKRELVAGISAHGSTDYID |
| | | SVKGRFTISRDNAKNSVYLQMNSLRAEDTAVYYCYAYRWRTRYTYWGQGTLVTVSS |
| 257 | 3D01 | EVQLVESGGGLVQPGGSLTLSCAASGSSVSFLSMAWYRQAPGKKRELVAGISRDGSTDYID |
| | | SVKGRFTISRDNAKNSVYLQMNSLRAEDTAVYYCYAYRWITRYTYWGQGTLVTVSS |
| 258 | 3D02 | EVQLVESGGGLVQPGGSLTLSCAASGSSVRFLSMAWYRQAPGKKRELVAGISRDGSTDYID |
| | | SVKGRFTISRDNAKNSVYLQMNSLRAEDTAVYYCYAYRWITRYTYWGQGTLVTVSS |
| 259 | 3D03 | EVQLVESGGGLVQPGGSLTLSCAASGSSVVFLSMAWYRQAPGKKRELVAGISADGSMDYID |
| | | SVKGRFTISRDNAKNSVYLQMNSLRAEDTAVYYCYAYRWRTRYTYWGQGTLVTVSS |
| 260 | 3D05 | EVQLVESGGGLVQPGGSLTLSCAASGSSVRFLSMAWYRQAPGKKRELVAGISADGSTDYID |
| | | SVKGRFTISRDNAKNSVYLQMNSLRAEDTAVYYCYAYRWTRRYTYWGQGTLVTVSS |
| 261 | 3D07 | EVQLVESGGGLVQPGGSLTLSCAASGSSVRFLSMAWYRQAPGKKRELVAGISADGSTDYID |
| | | SVKGRFTISRDNAKNSVYLQMNSLRAEDTAVYYCYAYSWTTRYTYWGQGTLVTVSS |
| 262 | 3D08 | EVQLVESGGGLVQPGGSLTLSCAASGSSVRFLSMAWYRQAPGKKRELVAGISANGSTDYID |
| | | SVKGRFTISRDNAKNSVYLQMNSLRAEDTAVYYCYAYRWTNRYTYWGQGTLVTVSS |
| 263 | 3D09 | EVQLVESGGGLVQPGGSLTLSCAASGSSVSRLSMAWYRQAPGKKRELVAGISANGSTTYID |
| | | SVKGRFTISRDNAKNSVYLQMNSLRAEDTAVYYCYAYRWTTRYRYWGQGTLVTVSS |
| 264 | 3D010 | EVQLVESGGGLVQPGGSLTLSCAASGSSKSFLSMAWYRQAPGKKRELVAGISADGSTSYID |
| | | SVKGRFTISRDNAKNSVYLQMNSLRAEDTAVYYCYAYRWTTRYTYWGQGTLVTVSS |
| 265 | 3D011 | EVQLVESGGGLVQPGGSLTLSCAASGSSVSRLSMAWYRQAPGKKRELVAGISADGSRDYID |
| | | SVKGRFTISRDNAKNSVYLQMNSLRAEDTAVYYCYAYRWTTRYKYWGQGTLVTVSS |
| 266 | 3E01 | EVQLVESGGGLVQPGGSLTLSCAASGSSVKFLSMAWYRQAPGKKRELVAGISADGSTMYID |
| | | SVKGRFTISRDNAKNSVYLQMNSLRAEDTAVYYCYAYRWHTRYTYWGQGTLVTVSS |
| 267 | 3E02 | EVQLVESGGGLVQPGGSLTLSCAASGSGVRFLSMAWYRQAPGKKRELVAGISPDGSTDYID |
| | | SVKGRFTISRDNAKNSVYLQMNSLRAEDTAVYYCYAYRWTRRYTYWGQGTLVTVSS |
| 268 | 3E03 | EVQLVESGGGLVQPGGSLTLSCAASGSSVRFLSMAWYRQAPGKKRELVAGISGDGSTDYID |
| | | SVKGRFTISRDNAKNSVYLQMNSLRAEDTAVYYCYAYRWMTRYTYWGQGTLVTVSS |
| 269 | 3E04 | EVQLVESGGGLVQPGGSLTLSCAASGSSVHFLSMAWYRQAPGKKRELVAGISRDGSTDYID |
| | | SVKGRFTISRDNAKNSVYLQMNSLRAEDTAVYYCYAYRWTTRYRYWGQGTLVTVSS |
| 270 | 3E09 | EVQLVESGGGLVQPGGSLTLSCAASGSSVRFLSMAWYRQAPGKKRELVAGISRDGSTDYID |
| | | SVKGRFTISRDNAKNSVYLQMNSLRAEDTAVYYCYAYRWSTRYTYWGQGTLVTVSS |
| 271 | 3E011 | EVQLVESGGGLVQPGGSLTLSCAASGSKVSFLSMAWYRQAPGKKRELVAGISRDGSTDYID |
| | | SVKGRFTISRDNAKNSVYLQMNSLRAEDTAVYYCYAYRWTTRYTFWGQGTLVTVSS |
| 272 | 3F03 | EVQLVESGGGLVQPGGSLTLSCAASGSSVSFLSMAWYRQAPGKKRELVAGISADGSTDYID |
| | | SVKGRFTISRDNAKNSVYLQMNSLRAEDTAVYYCYAYRWRTRYTYWGQGTLVTVSS |
| 273 | 3F05 | EVQLVESGGGLVQPGGSLTLSCAASGSKVSFLSMAWYRQAPGKKRELVAGISTDGSTDYID |
| | | SVKGRFTISRDNAKNSVYLQMNSLRAEDTAVYYCYAYRWTTRRTYWGQGTLVTVSS |
| 274 | 3F06 | EVQLVESGGGLVQPGGSLTLSCAASGSRVSFLSMAWYRQAPGKKRELVAGISADGSTSYID |
| | | SVKGRFTISRDNAKNSVYLQMNSLRAEDTAVYYCYAYRWATRYTYWGQGTLVTVSS |
| 275 | 3F08 | EVQLVESGGGLVQPGGSLTLSCAASGSRVSFLSMAWYRQAPGKKRELVAGISADGSTLYID |
| | | SVKGRFTISRDNAKNSVYLQMNSLRAEDTAVYYCYAYRWHTRYTYWGQGTLVTVSS |
| 276 | 3F09 | EVQLVESGGGLVQPGGSLTLSCAASGSSVRFLSMAWYRQAPGKKRELVAGISRDGSTDYID |
| | | SVKGRFTISRDNAKNSVYLQMNSLRAEDTAVYYCYAYRWGTRYTYWGQGTLVTVSS |
| 277 | 3F010 | EVQLVESGGGLVQPGGSLTLSCAASYSSVSRLSMAWYRQAPGKKRELVAGISADGSTVYID |
| | | SVKGRFTISRDNAKNSVYLQMNSLRAEDTAVYYCYAYRWTTRNTYWGQGTLVTVSS |
| 278 | 3F011 | EVQLVESGGGLVQPGGSLTLSCAASGSSVSFLSMAWYRQAPGKKRELVAGISTDGSTDYID |
| | | SVKGRFTISRDNAKNSVYLQMNSLRAEDTAVYYCYAYRWRTRYTYWGQGTLVTVSS |
| 279 | 3G01 | EVQLVESGGGLVQPGGSLTLSCAASGSSVSFLSMAWYRQAPGKKRELVAGISADGSTLYID |
| | | SVKGRFTISRDNAKNSVYLQMNSLRAEDTAVYYCYAYRWTTRYAYWGQGTLVTVSS |
| 280 | 3G02 | EVQLVESGGGLVQPGGSLTLSCAASGSSVSFLSMAWYRQAPGKKRELVAGISADGRTDYID |
| | | SVKGRFTISRDNAKNSVYLQMNSLRAEDTAVYYCYAYRWRTRYTYWGQGTLVTVSS |
| 281 | 3G04 | EVQLVESGGGLVQPGGSLTLSCVASGTSVSFLSMAWYRQAPGKKRELVAGISADGSTIYID |
| | | SVKGRFTISRDNAKNSVYLQMNSLRAEDTAVYYCYAYRWTTRRTYWGQGTLVTVSS |
| 282 | 3G06 | EVQLVESGGGLVQPGGSLTLSCAASGSSVKFLSMAWYRQAPGKKRELVAGISADGSTLYID |
| | | SVKGRFTISRDNAKNSVYLQMNSLRAEDTAVYYCYAYRWTTRRTYWGQGTLVTVSS |
| 283 | 3G07 | EVQLVESGGGLVQPGGSLTLSCAASGSSVSFLSMAWYRQAPGKKRELVAGISRDGSTDYID |
| | | SVKGRFTISRDNAKNSVYLQMNSLRAEDTAVYYCYAYRWTSRYTYWGQGTLVTVSS |
| 284 | 3G08 | EVQLVESGGGLVQPGGSLTLSCAASGSRVSFLSMAWYRQAPGKKRELVAGISKDGSTDYID |
| | | SVKGRFTISRDNAKNSVYLQMNSLRAEDTAVYYCYAYRWTTRVTYWGQGTLVTVSS |
| 285 | 3G09 | EVQLVESGGGLVQPGGSLTLSCAASGSSVSVLSMAWYRQAPGKKRELVAGISADGSTDYIG |
| | | SVKGRFTISRDNAKNSVYLQMNSLRAEDTAVYYCYAYRWTTRTTYWGQGTLVTVSS |
| 286 | 3G010 | EVQLVESGGGLVQPGGSLTLSCAASGSSVSFLSMAWYRQAPGKKRELVAGISVDGSTDYID |
| | | SVKGRFTISRDNAKNSVYLQMNSLRAEDTAVYYCYAYRWRTRYTYWGQGTLVTVSS |
| 287 | 3G011 | EVQLVESGGGLVQPGGSLTLSCAASGSRVSFLSMAWYRQAPGKKRELVAGISADGSTGYID |
| | | SVKGRFTISRDNAKNSVYLQMNSLRAEDTAVYYCYAYRWATRYTYWGQGTLVTVSS |
| 288 | 3H01 | EVQLVESGGGLVQPGGSLTLSCVASGSSVKFLSMAWYRQAPGKKRELVAGISGDGSTTYID |
| | | SVKGRFTISRDNAKNSVYLQMNSLRAEDTAVYYCYAYRWTTRRTYWGQGTLVTVSS |
| 289 | 3H03 | EVQLVESGGGLVQPGGSLTLSCAASGSSVRFLSMAWYRQAPGKKRELVAGISTDGSTDYID |
| | | SVKGRFTISRDNAKNSVYLQMNSLRAEDTAVYYCYALRWTTRYTYWGQGTLVTVSS |
| 290 | 3H06 | EVQLVESGGGLVQPGGSLTLSCAASGSSVSQLSMAWYRQAPGKKRELVAGISADGSTDYED |
| | | SVKGRFTISRDNAKNSVYLQMNSLRAEDTAVYYCYAYRWTTRGTYWGQGTLVTVSS |
| 291 | 3H07 | EVQLVESGGGLVQPGGSLTLSCAASGSRVSFLSMAWYRQAPGKKRELVAGISADGSTSYID |
| | | SVKGRFTISRDNAKNSVYLQMNSLRAEDTAVYYCYAYRWRTRYTYWGQGTLVTVSS |
| 292 | 3H09 | EVQLVESGGGLVQPGGSLTLSCAASKSSVSFLSMAWYRQAPGKKRELVAGISADGSTDYID |
| | | SVKGRFTISRDNAKNSVYLQMNSLRAEDTAVYYCYAYRWTTRATYWGQGTLVTVSS |
| 293 | 3H010 | EVQLVESGGGLVQPGGSLTLSCAASGSSVSFLSMAWYRQAPGKKRELVAGISADGSTAYID |
| | | SVKGRFTISRDNAKNSVYLQMNSLRAEDTAVYYCYAYRWTTRRTYWGQGTLVTVSS |
| 294 | 3H011 | EVQLVESGGGLVQPGGSLTLSCAASGSSVKFLSMAWYRQAPGKKRELVAGISADGSTVYID |
| | | SVKGRFTISRDNAKNSVYLQMNSLRAEDTAVYYCYAYRWPTRYTYWGQGTLVTVSS |
| 295 | 4A01 | EVQLVESGGGLVQPGGSLTLSCAASGSSVRFLSMAWYRQAPGKKRELVAGISQDGSTDYID |
| | | SVKGRFTISRDNAKNSVYLQMNSLRAEDTAVYYCYAYRWRTRYTYWGQGTLVTVSS |
| 296 | 4A02 | EVQLVESGGGLVQPGGSLTLSCAASGSSVRFLSMAWYRQAPGKKRELVAGISNDGSTDYID |
| | | SVKGRFTISRDNAKNSVYLQMNSLRAEDTAVYYCYAYRWKTRYTYWGQGTLVTVSS |
| 297 | 4A04 | EVQLVESGGGLVQPGGSLTLSCAASGSRVSFLSMAWYRQAPGKKRELVAGISARGSTDYID |
| | | SVKGRFTISRDNAKNSVYLQMNSLRAEDTAVYYCYAYRWSTRYTYWGQGTLVTVSS |
| 298 | 4A05 | EVQLVESGGGLVQPGGSLTLSCAASGSSVSFLSLAWYRQAPGKKRELVAGISADGSTDYID |
| | | SVKGRFTISRDNAKNSVYLQMNSLRAEDTAVYYCYAYRWKTRRTYWGQGTLVTVSS |
| 299 | 4A06 | EVQLVESGGGLVQPGGSLTLSCAASGSSVRFLSMAWYRQAPGKKRELVAGISRDGSTDYID |
| | | SVKGRFTISRDNAKNSVYLQMNSLRAEDTAVYYCYAYRWTTRRTYWGQGTLVTVSS |
| 300 | 4A07 | EVQLVESGGGLVQPGGSLTLSCAASGSKVSFLSMAWYRQAPGKKRELVAGISADGSTLYID |
| | | SVKGRFTISRDNAKNSVYLQMNSLRAEDTAVYYCYAYRWTTRYRYWGQGTLVTVSS |
| 301 | 4A08 | EVQLVESGGGLVQPGGSLTLSCAASGSSVSFLSMAWYRQAPGKKRELVAGISADGSTNYID |
| | | SVKGRFTISRDNAKNSVYLQMNSLRAEDTAVYYCYAYRWRTRYTYWGQGTLVTVSS |
| 302 | 4A010 | EVQLVESGGGLVQPGGSLTLSCAASGSSVRFLSMAWYRQAPGKKRELVAGISADGSTVYID |
| | | SVKGRFTISRDNAKNSVYLQMNSLRAEDTAVYYCYAYRWTTRYKYWGQGTLVTVSS |
| 303 | 4A011 | EVQLVESGGGLVQPGGSLTLSCAASGSKVSFLSMAWYRQAPGKKRELVAGISADGSTTYID |
| | | SVKGRFTISRDNAKNSVYLQMNSLRAEDTAVYYCYAYRWKTRYTYWGQGTLVTVSS |
| 304 | 4A09 | EVQLVESGGGLVQPGGSLTLSCAASGSSVKFLSMAWYRQAPGKKRELVAGISADGSTDYIG |
| | | SVKGRFTISRDNAKNSVYLQMNSLRAEDTAVYYCYAYRWTTRVTYWGQGTLVTVSS |
| 305 | 4B01 | EVQLVESGGGLVQPGGSLTLSCAASGSSVKFLSMAWYRQAPGKKRELVAGISRDGSTDYID |
| | | SVKGRFTISRDNAKNSVYLQMNSLRAEDTAVYYCYAYRWTTRFTYWGQGTLVTVSS |
| 306 | 4B02 | EVQLVESGGGLVQPGGSLTLSCAASGSRVSFLSMAWYRQAPGKKRELVAGISADGSTTYID |
| | | SVKGRFTISRDNAKNSVYLQMNSLRAEDTAVYYCYAYRWTTRFTYWGQGTLVTVSS |
| 307 | 4B04 | EVQLVESGGGLVQPGGSLTLSCAASGSSVLFLSMAWYRQAPGKKRELVAGVSSDGSTDYID |
| | | SVKGRFTISRDNAKNSVYLQMNSLRAEDTAVYYCYAYRWRTRYTYWGQGTLVTVSS |
| 308 | 4B05 | EVQLVESGGGLVQPGGSLTLSCAASGSRVSFLSMAWYRQAPGKKRELVAGISADGHTDYID |
| | | SVKGRFTISRDNAKNSVYLQMNSLRAEDTAVYYCYAYRWTTRYTHWGQGTLVTVSS |
| 309 | 4B06 | EVQLVESGGGLVQPGGSLTLSCAASGSRVSFLSMAWYRQAPGKKRELVAGISADGSTDYED |
| | | SVKGRFTISRDNAKNSVYLQMNSLRAEDTAVYYCYAYRWTRRYTYWGQGTLVTVSS |
| 310 | 4B07 | EVQLVESGGGLVQPGGSLTLSCAASGSSVGFLSMAWYRQAPGKKRELVAGISADGSTVYID |
| | | SVKGRFTISRDNAKNSVYLQMNSLRAEDTAVYYCYAYRWTTRYTYWGQGTLVTVSS |
| 311 | 4B08 | EVQLVESGGGLVQPGGSLTLSCAASGSSVSFMSMAWYRQAPGKKRELVAGISADGSTDYIA |
| | | SVKGRFTISRDNAKNSVYLQMNSLRAEDTAVYYCYAYRWTTRSTYWGQGTLVTVSS |
| 312 | 4B09 | EVQLVESGGGLVQPGGSLTLSCAASGSSVSFLSMAWYRQAPGKKRELVAGISADGSTDYIS |
| | | SVKGRFTISRDNAKNSVYLQMNSLRAEDTAVYYCYAYSWTTRYTYWGQGTLVTVSS |
| 313 | 4B011 | EVQLVESGGGLVQPGGSLTLSCAASGSSVTFLSMAWYRQAPGKKRELVAGISADGSTVYID |
| | | SVKGRFTISRDNAKNSVYLQMNSLRAEDTAVYYCYAYRWTTRGTYWGQGTLVTVSS |
| 314 | 4C01 | EVQLVESGGGLVQPGGSLTLSCAASGSSVRFLSMAWYRQAPGKKRELVAGISADGSTVYID |
| | | SVKGRFTISRDNAKNSVYLQMNSLRAEDTAVYYCYAYRWKTRYTYWGQGTLVTVSS |
| 315 | 4C02 | EVQLVESGGGLVQPGGSLTLSCAASGSKVSFLSMAWYRQAPGKKRELVAGISADGSTTYID |
| | | SVKGRFTISRDNAKNSVYLQMNSLRAEDTAVYYCYAYRWTTRFTYWGQGTLVTVSS |
| 316 | 4C03 | EVQLVESGGGLVQPGGSLTLSCAASGSKVSFMSMAWYRQAPGKKRELVAGISVDGSTDYID |
| | | SVKGRFTISRDNAKNSVYLQMNSLRAEDTAVYYCYAYRWRTRYTYWGQGTLVTVSS |
| 317 | 4C05 | EVQLVESGGGLVQPGGSLTLSCAASGSSVSNLSMAWYRQAPGKKRELVAGISADGSTAYID |
| | | SVKGRFTISRDNAKNSVYLQMNSLRAEDTAVYYCYAYRWTTRRTYWGQGTLVTVSS |
| 318 | 4C06 | EVQLVESGGGLVQPGGSLTLSCAASNSSVSKLSMAWYRQAPGKKRELVAGISADGSTAYID |
| | | SVKGRFTISRDNAKNSVYLQMNSLRAEDTAVYYCYAYRWSTRYTYWGQGTLVTVSS |
| 319 | 4C07 | EVQLVESGGGLVQPGGSLTLSCAASGSKVSFLSMAWYRQAPGKKRELVAGISADGSKDYID |
| | | SVKGRFTISRDNAKNSVYLQMNSLRAEDTAVYYCYAYRWTTRLTYWGQGTLVTVSS |
| 320 | 4C08 | EVQLVESGGGLVQPGGSLTLSCVASGSQVSFLSMAWYRQAPGKKRELVAGISADGSTDYED |
| | | SVKGRFTISRDNAKNSVYLQMNSLRAEDTAVYYCYAYRWTRRYTYWGQGTLVTVSS |
| 321 | 4C010 | EVQLVESGGGLVQPGGSLTLSCAASGSKVSFMSMAWYRQAPGKKRELVAGISADGSTDYID |
| | | SVKGRFTISRDNAKNSVYLQMNSLRAEDTAVYYCYAYRWTTRLTYWGQGTLVTVSS |
| 322 | 4C011 | EVQLVESGGGLVQPGGSLTLSCAASGSRVSFLSMAWYRQAPGKKRELVAGISADGSTVYID |
| | | SVKGRFTISRDNAKNSVYLQMNSLRAEDTAVYYCYAYRWTRRYTYWGQGTLVTVSS |
| 323 | 4D01 | EVQLVESGGGLVQPGGSLTLSCAASGSSVRFLSMAWYRQAPGKKRELVAGISADGSTVYID |
| | | SVKGRFTISRDNAKNSVYLQMNSLRAEDTAVYYCYAYRWTTRRTYWGQGTLVTVSS |
| 324 | 4D02 | EVQLVESGGGLVQPGGSLTLSCAASGSKVSFLSMAWYRQAPGKKRELVAGISARGSTDYID |
| | | SVKGRFTISRDNAKNSVYLQMNSLRAEDTAVYYCYAYQWTTRYTYWGQGTLVTVSS |
| 325 | 4D03 | EVQLVESGGGLVQPGGSLTLSCAASGSSVRFLSMAWYRQAPGKKRELVAGISATGSTDYID |
| | | SVKGRFTISRDNAKNSVYLQMNSLRAEDTAVYYCYAYRWTRRYTYWGQGTLVTVSS |
| 326 | 4D04 | EVQLVESGGGLVQPGGSLTLSCAASGSSVSFLSIAWYRQAPGKKRELVAGISKDGSTDYID |
| | | SVKGRFTISRDNAKNSVYLQMNSLRAEDTAVYYCYAYRWTTRMTYWGQGTLVTVSS |
| 327 | 4D05 | EVQLVESGGGLVQPGGSLTLSCAASGSSSSFLSMAWYRQAPGKKRELVAGISADGSTVYID |
| | | SVKGRFTISRDNAKNSVYLQMNSLRAEDTAVYYCYAYRWTTRRTYWGQGTLVTVSS |
| 328 | 4D06 | EVQLVESGGGLVQPGGSLTLSCAASGSSVKFLSMAWYRQAPGKKRELVAGISPDGSTDYID |
| | | SVKGRFTISRDNAKNSVYLQMNSLRAEDTAVYYCYAYRWTTRYRYWGQGTLVTVSS |
| 329 | 4D08 | EVQLVESGGGLVQPGGSLTLSCAASGSSVNFLSMAWYRQAPGKKRELVAGISADGSTHYID |
| | | SVKGRFTISRDNAKNSVYLQMNSLRAEDTAVYYCYAYRWLTRYTYWGQGTLVTVSS |
| 330 | 4D09 | EVQLVESGGGLVQPGGSLTLSCAASGSSVKFLSMAWYRQAPGKKRELVAGISADGSTDYIL |
| | | SVKGRFTISRDNAKNSVYLQMNSLRAEDTAVYYCYAYEWTTRYTYWGQGTLVTVSS |
| 331 | 4D010 | EVQLVESGGGLVQPGGSLTLSCAASGSSVSFLSMAWYRQAPGKKRELVAGISADGSTDYIH |
| | | SVKGRFTISRDNAKNSVYLQMNSLRAEDTAVYYCYAYRWRTRYTYWGQGTLVTVSS |
| 332 | 4D011 | EVQLVESGGGLVQPGGSLTLSCAASGSSVRFLSMAWYRQAPGKKRELVAGISVDGSTDYID |
| | | SVKGRFTISRDNAKNSVYLQMNSLRAEDTAVYYCYAYRWRTRYTYWGQGTLVTVSS |
| 333 | 4E01 | EVQLVESGGGLVQPGGSLTLSCAASGSSVSFLSVAWYRQAPGKKRELVAGISRDGSTDYID |
| | | SVKGRFTISRDNAKNSVYLQMNSLRAEDTAVYYCYAYRWRTRYTYWGQGTLVTVSS |
| 334 | 4E02 | EVQLVESGGGLVQPGGSLTLSCAASGSQVSFLSMAWYRQAPGKKRELVAGISADGSTVYID |
| | | SVKGRFTISRDNAKNSVYLQMNSLRAEDTAVYYCYAYRWSTRYTYWGQGTLVTVSS |
| 335 | 4E06 | EVQLVESGGGLVQPGGSLTLSCAASGTSVSFLSMAWYRQAPGKKRELVAGISADGSTDYIR |
| | | SVKGRFTISRDNAKNSVYLQMNSLRAEDTAVYYCYAYRWTTRLTYWGQGTLVTVSS |
| 336 | 4E07 | EVQLVESGGGLVQPGGSLTLSCAASGSRVSFLSMAWYRQAPGKKRELVAGISADGSTMYID |
| | | SVKGRFTISRDNAKNSVYLQMNSLRAEDTAVYYCYAYRWTTRLTYWGQGTLVTVSS |
| 337 | 4E08 | EVQLVESGGGLVQPGGSLTLSCAASGSSVKFLSMAWYRQAPGKKRELVAGISTDGSTDYID |
| | | SVKGRFTISRDNAKNSVYLQMNSLRAEDTAVYYCYAYKWTTRYTYWGQGTLVTVSS |
| 338 | 4E09 | EVQLVESGGGLVQPGGSLTLSCAASGSSVSFLSSAWYRQAPGKKRELVAGISADGSTLYID |
| | | SVKGRFTISRDNAKNSVYLQMNSLRAEDTAVYYCYAYRWTTRSTYWGQGTLVTVSS |
| 339 | 4E010 | EVQLVESGGGLVQPGGSLTLSCAASGSSVKFLSMAWYRQAPGKKRELVAGISADGSTDYID |
| | | SVKGRFTISRDNAKNSVYLQMNSLRAEDTAVYYCYAYRWRTRYTYWGQGTLVTVSS |
| 340 | 4E011 | EVQLVESGGGLVQPGGSLTLSCAASGSSVSFLSMAWYRQAPGKKRELVAGISATGSTDYID |
| | | SVKGRFTISRDNAKNSVYLQMNSLRAEDTAVYYCYAYRWSTRYTYWGQGTLVTVSS |
| 341 | 4F02 | EVQLVESGGGLVQPGGSLTLSCAASGSTVSFLSMAWYRQAPGKKRELVAGISHDGSTDYID |
| | | SVKGRFTISRDNAKNSVYLQMNSLRAEDTAVYYCYAYRWTTRYTYWGQGTLVTVSS |
| 342 | 4F03 | EVQLVESGGGLVQPGGSLTLSCAASGSSVQFLSMAWYRQAPGKKRELVAGISYDGSTDYID |
| | | SVKGRFTISRDNAKNSVYLQMNSLRAEDTAVYYCYAYRWRTRYTYWGQGTLVTVSS |
| 343 | 4F04 | EVQLVESGGGLVQPGGSLTLSCAASRSSVSFLSMAWYRQAPGKKRELVAGISTDGSTDYID |
| | | SVKGRFTISRDNAKNSVYLQMNSLRAEDTAVYYCYAYRWLTRYTYWGQGTLVTVSS |
| 344 | 4F08 | EVQLVESGGGLVQPGGSLTLSCAASGSKVSFLSMAWYRQAPGKKRELVAGISADGSTAYID |
| | | SVKGRFTISRDNAKNSVYLQMNSLRAEDTAVYYCYAYRWRTRYTYWGQGTLVTVSS |
| 345 | 4F09 | EVQLVESGGGLVQPGGSLTLSCAASGSRVSFLSMAWYRQAPGKKRELVAGISADGSTDYIE |
| | | SVKGRFTISRDNAKNSVYLQMNSLRAEDTAVYYCYAYRWTTRYTYWGQGTLVTVSS |
| 346 | 4F010 | EVQLVESGGGLVQPGGSLTLSCAASGSSVSFLSMAWYRQAPGKKRELVAGISIDGSTDYIK |
| | | SVKGRFTISRDNAKNSVYLQMNSLRAEDTAVYYCYAYRWTTRYRYWGQGTLVTVSS |
| 347 | 4F011 | EVQLVESGGGLVQPGGSLTLSCAASGSKVSFLSMAWYRQAPGKKRELVAGISADGSKDYID |
| | | SVKGRFTISRDNAKNSVYLQMNSLRAEDTAVYYCYAYRWTTRYTYWGQGTLVTVSS |
| 348 | 4G01 | EVQLVESGGGLVQPGGSLTLSCAASGSSVRFLSMAWYRQAPGKKRELVAGISADGSTVYID |
| | | SVKGRFTISRDNAKNSVYLQMNSLRAEDTAVYYCYAYRWPTRYTYWGQGTLVTVSS |
| 349 | 4G02 | EVQLVESGGGLVQPGGSLTLSCAASGSSVKFLSMAWYRQAPGKKRELVAGISRDGSTDYID |
| | | SVKGRFTISRDNAKNSVYLQMNSLRAEDTAVYYCYAYRWTTRHTYWGQGTLVTVSS |
| 350 | 4G03 | EVQLVESGGGLVQPGGSLTLSCAASGSSVKFLSMAWYRQAPGKKRELVAGISADGSTDYIH |
| | | SVKGRFTISRDNAKNSVYLQMNSLRAEDTAVYYCYAYRWTRRYTYWGQGTLVTVSS |
| 351 | 4G05 | EVQLVESGGGLVQPGGSLTLSCAASGSSVSILSMAWYRQAPGKKRELVAGISADGSTIYID |
| | | SVKGRFTISRDNAKNSVYLQMNSLRAEDTAVYYCYAYRWHTRYTYWGQGTLVTVSS |
| 352 | 4G07 | EVQLVESGGGLVQPGGSLTLSCAASGSSVSFLSVAWYRQAPGKKRELVAGISANGSTDYID |
| | | SVKGRFTISRDNAKNSVYLQMNSLRAEDTAVYYCYAYRWTNRYTYWGQGTLVTVSS |
| 353 | 4G08 | EVQLVESGGGLVQPGGSLTLSCAASGSSVRFLSMAWYRQAPGKKRELVAGISTDGSTDYID |
| | | SVKGRFTISRDNAKNSVYLQMNSLRAEDTAVYYCYAYRWTTRYRYWGQGTLVTVSS |
| 354 | 4G09 | EVQLVESGGGLVQPGGSLTLSCAASGSRVSFLSMAWYRQAPGKKRELVAGISYDGSTDYID |
| | | SVKGRFTISRDNAKNSVYLQMNSLRAEDTAVYYCYAYRWTTRRTYWGQGTLVTVSS |
| 355 | 4G010 | EVQLVESGGGLVQPGGSLTLSCAASGHSVSFLSMAWYRQAPGKKRELVAGISADGSTDYIA |
| | | SVKGRFTISRDNAKNSVYLQMNSLRAEDTAVYYCYAYRWSTRYTYWGQGTLVTVSS |
| 356 | 4G011 | EVQLVESGGGLVQPGGSLTLSCAASGSSVRFLSMAWYRQAPGKKRELVAGISADGSTDYIG |
| | | SVKGRFTISRDNAKNSVYLQMNSLRAEDTAVYYCYAYRWSTRYTYWGQGTLVTVSS |
| 357 | 4H01 | EVQLVESGGGLVQPGGSLTLSCAASGSSVSFLSMAWYRQAPGKKRELVAGISANGSTDYYD |
| | | SVKGRFTISRDNAKNSVYLQMNSLRAEDTAVYYCYAYRWRTRYTYWGQGTLVTVSS |
| 358 | 4H03 | EVQLVESGGGLVQPGGSLTLSCAASGSRVSFLSMAWYRQAPGKKRELVAGISADGSTSYID |
| | | SVKGRFTISRDNAKNSVYLQMNSLRAEDTAVYYCYAYRWTTRYTYWGQGTLVTVSS |
| 359 | 4H04 | EVQLVESGGGLVQPGGSLTLSCAASGSSVKFLSMAWYRQAPGKKRELVAGVSADGSTDYID |
| | | SVKGRFTISRDNAKNSVYLQMNSLRAEDTAVYYCYAYEWTTRYTYWGQGTLVTVSS |
| 360 | 4H05 | EVQLVESGGGLVQPGGSLTLSCAASGSSVSRLSMAWYRQAPGKKRELVAGISARGSTDYID |
| | | SVKGRFTISRDNAKNSVYLQMNSLRAEDTAVYYCYAYRWTTRSTYWGQGTLVTVSS |
| 361 | 4H06 | EVQLVESGGGLVQPGGSLTLSCAASGRSVSFLSMAWYRQAPGKKRELVAGISADGSTIYID |
| | | SVKGRFTISRDNAKNSVYLQMNSLRAEDTAVYYCYAYRWTTRYTYWGQGTLVTVSS |
| 362 | 4H07 | EVQLVESGGGLVQPGGSLTLSCAASGRSVSFLSMAWYRQAPGKKRELVAGISANGSTDYID |
| | | SVKGRFTISRDNAKNSVYLQMNSLRAEDTAVYYCYAYRWSTRYTYWGQGTLVTVSS |
| 363 | 4H08 | EVQLVESGGGLVQPGGSLTLSCAASGSSVKFLSMAWYRQAPGKKRELVAGISADGSTDYVD |
| | | SVKGRFTISRDNAKNSVYLQMNSLRAEDTAVYYCYAYRWSTRYTYWGQGTLVTVSS |
| 364 | 4H09 | EVQLVESGGGLVQPGGSLTLSCAASGSSVSKLSMAWYRQAPGKKRELVAGISADGSTDYRD |
| | | SVKGRFTISRDNAKNSVYLQMNSLRAEDTAVYYCYAYRWTYRYTYWGQGTLVTVSS |
| 365 | 4H011 | EVQLVESGGGLVQPGGSLTLSCAASGSSVSRLSMAWYRQAPGKKRELVAGISVDGSTDYID |
| | | SVKGRFTISRDNAKNSVYLQMNSLRAEDTAVYYCYAYRWTTRLTYWGQGTLVTVSS |
| 366 | 4D09- | EVQLVESGGGLVQPGGSLTLSCAASGSSVKFLSLAWYRQAPGKKRELVAGISADGSTDYIL |
| | M34L | SVKGRFTISRDNAKNSVYLQMNSLRAEDTAVYYCYAYEWTTRYTYWGQGTLVTVSS |
| 367 | 4H11- | EVQLVESGGGLVQPGGSLTLSCAASGSSVSRLSLAWYRQAPGKKRELVAGISVDGSTDYID |
| | M34L | SVKGRFTISRDNAKNSVYLQMNSLRAEDTAVYYCYAYRWTTRLTYWGQGTLVTVSS |
| 368 | 41B11 | EVQLVESGGGLVQPGGSLTLSCVASGTSSSINAMGWYRRAPGKQRELVAGISSDGSKVFNE |
| | | SVKGRFTISRDNAKNSVYLQMNSLRAEDTAVYYCYYERPAAGSPMRYWGQGTLVTVSS |
| 369 | 41C02 | EVQLVESGGGLVQPGGSLTLSCVASGTTSSINAIGWYRRAPGKQRELVAGISSDGSEVYTD |
| | | SVKGRFTISRDNAKNSVYLQMNSLRAEDTAVYYCYYFRTVDGSPLRYWGQGTLVTVSS |
| 370 | 41D01 | EVQLVESGGGLVQPGGSLTLSCVASGSTSSINAMAWYRRAPGKQRELVAGISSDDSNVYYE |
| | | SVKGREFTISRDNAKNSVYLQMNSLRAEDTAVYYCYYFRTVSGSSKRYWGQGTLVTVSS |
| 371 | 41D02 | EVQLVESGGGLVQPGGSLTLSCVASGQTYRVNAFGWYRRAPGKQRELVAGISSDGSKVYAD |
| | | SVKGRFTISRDNAKNSVYLQMNSLRAEDTAVYYCYYFSAGSGTEMSYWGQGTLVTVSS |
| 372 | 41D03 | EVQLVESGGGLVQPGGSLTLSCVASGSTSSINAMAWYRRAPGKQRELVAGISSDESTLYVD |
| | | SVKGRFTISRDNAKNSVYLQMNSLRAEDTAVYYCYYFGSLSGSSTTYWGQGTLVTVSS |
| 373 | 41D07 | EVQLVESGGGLVQPGGSLTLSCVASGSASLTNATGWYRRAPGKQRELVAGISSDDSKVYSD |
| | | SVKGRFTISRDNAKNSVYLQMNSLRAEDTAVYYCYYFGSVSGSWTRYWGQGTLVTVSS |
| 374 | 41E01 | EVQLVESGGGLVQPGGSLTLSCVASGYPSLNNAMGWYRRAPGKQRELVAGISSDGSQVYGA |
| | | SVKGRFTISRDNAKNSVYLQMNSLRAEDTAVYYCYYFRLVSGSSMSYWGQGTLVTVSS |
| 375 | 41E02 | EVQLVESGGGLVQPGGSLTLSCVASGSSSTINAIGWYRRAPGKQRELVAGISSDGSKVYAD |
| | | SVKGRFTISRDNAKNSVYLQMNSLRAEDTAVYYCYYFRTGSGTSKSYWGQGTLVTVSS |
| 376 | 41F07 | EVQLVESGGGLVQPGGSLTLSCVASGSTSYINAMGWYRRAPGKQRELVAGISSDGSNMYAD |
| | | SVKGRFTISRDNAKNSVYLQMNSLRAEDTAVYYCYYFSNMSGTTRRYWGQGTLVTVSS |
| 377 | 41G01 | EVQLVESGGGLVQPGGSLTLSCVASGSTSSVNALGWYRRAPGKQRELVAGISSDGSKVYTD |
| | | SVKGRFTISRDNAKNSVYLQMNSLRAEDTAVYYCYYFRTVPGSAMGYWGQGTLVTVSS |
| 378 | 42A03 | EVQLVESGGGLVQPGGSLTLSCVASGSTSLSNAVGWYRRAPGKQRELVAGISSDGSKVSAE |
| | | SVKGRFTISRDNAKNSVYLQMNSLRAEDTAVYYCYYFRAESGSSMGYWGQGTLVTVSS |
| 379 | 42A06 | EVQLVESGGGLVQPGGSLTLSCVASGSTSSTNAIGWYRRAPGKQRELVAGISSDGSKVYDD |
| | | SVKGRFTISRDNAKNSVYLQMNSLRAEDTAVYYCYYFRTLYGSSRSYWGQGTLVTVSS |
| 380 | 42A07 | EVQLVESGGGLVQPGGSLTLSCVASGLTSTINAMGWYRRAPGKQRELVAGISSDGSKVYDD |
| | | SVKGRFTISRDNAKNSVYLQMNSLRAEDTAVYYCYYFSPFSGSDTGYWGQGTLVTVSS |
| 381 | 42A08 | EVQLVESGGGLVQPGGSLTLSCVASGVSPSKNAIGWYRRAPGKQRELVAGISSDGSAVYVG |
| | | SVKGRFTISRDNAKNSVYLQMNSLRAEDTAVYYCYYFSTESGSSISYWGQGTLVTVSS |
| 382 | 42A11 | EVQLVESGGGLVQPGGSLTLSCVASGSTSSINAVGWYRRAPGKQRELVAGISSDGSYVYSE |
| | | SVKGRFTISRDNAKNSVYLQMNSLRAEDTAVYYCYYFRTLAGSEMRYWGQGTLVTVSS |
| 383 | 42B06 | EVQLVESGGGLVQPGGSLTLSCVASGSTTMNNAMAWYRRAPGKQRELVAGISSDSSHVYAD |
| | | SVKGRFTISRDNAKNSVYLQMNSLRAEDTAVYYCYYFRTVSGSGVRYWGQGTLVTVSS |
| 384 | 42B10 | EVQLVESGGGLVQPGGSLTLSCVASGSTSKINAIGWYRRAPGKQRELVAGISSDSSIVYTD |
| | | SVKGRFTISRDNAKNSVYLQMNSLRAEDTAVYYCYYFRPGAGHSNSYWGQGTLVTVSS |
| 385 | 42C01 | EVQLVESGGGLVQPGGSLTLSCVASGQTTALNAMGWYRRAPGKQRELVAGISSDGSEVNTD |
| | | SVKGRFTISRDNAKNSVYLQMNSLRAEDTAVYYCYYFRRASGTAMSYWGQGTLVTVSS |
| 386 | 42C03 | EVQLVESGGGLVQPGGSLTLSCVASGATSSINAIGWYRRAPGKQRELVAGISSDGSKLSSD |
| | | SVKGRFTISRDNAKNSVYLQMNSLRAEDTAVYYCYYFTSASGTDLSYWGQGTLVTVSS |
| 387 | 42C07 | EVQLVESGGGLVQPGGSLTLSCVASGSTSTINAMGWYRRAPGKQRELVAGISSDNSKVYAD |
| | | SVKGRFTISRDNAKNSVYLQMNSLRAEDTAVYYCYYERSANGSSKRYWGQGTLVTVSS |
| 388 | 42C08 | EVQLVESGGGLVQPGGSLTLSCVASGSTSSINAMGWYRRAPGKQRELVAGISSDGSRVYFD |
| | | SVKGRFTISRDNAKNSVYLQMNSLRAEDTAVYYCYYFKTIAGAGMRYWGQGTLVTVSS |
| 389 | 42C10 | EVQLVESGGGLVQPGGSLTLSCVASGSTSLVNAMGWYRRAPGKQRELVAGISSDGSLVYAE |
| | | SVKGRFTISRDNAKNSVYLQMNSLRAEDTAVYYCYYFRYGSGSSLSYWGQGTLVTVSS |
| 390 | 42C11 | EVQLVESGGGLVQPGGSLTLSCVASGSTSLNNAIGWYRRAPGKQRELVAGISSDGSVVYVD |
| | | SVKGRFTISRDNAKNSVYLQMNSLRAEDTAVYYCYYFRTVPGASMKYWGQGTLVTVSS |
| 391 | 42D05 | EVQLVESGGGLVQPGGSLTLSCVASGSTSPVNAMAWYRRAPGKQRELVAGISSDGSKVYVD |
| | | SVKGRFTISRDNAKNSVYLQMNSLRAEDTAVYYCYYFRTVDGSAISYWGQGTLVTVSS |
| 392 | 42D06 | EVQLVESGGGLVQPGGSLTLSCVASGTTSSMNAIGWYRRAPGKQRELVAGISSDGSKLYDE |
| | | SVKGRFTISRDNAKNSVYLQMNSLRAEDTAVYYCYYFRTVKGSGGSYWGQGTLVTVSS |
| 393 | 42D07 | EVQLVESGGGLVQPGGSLTLSCVASGETSSINAMAWYRRAPGKQRELVAGISSDYSKLYAD |
| | | SVKGRFTISRDNAKNSVYLQMNSLRAEDTAVYYCYYFRTVSGSSRGYWGQGTLVTVSS |
| 394 | 42D08 | EVQLVESGGGLVQPGGSLTLSCVASGSTSTINAIGWYRRAPGKQRELVAGISSDSSKVYTE |
| | | SVKGRFTISRDNAKNSVYLQMNSLRAEDTAVYYCYYFRPGPGSQMAYWGQGTLVTVSS |
| 395 | 42E01 | EVQLVESGGGLVQPGGSLTLSCVASGSTYSMNAMGWYRRAPGKQRELVAGISSDGSQVYVD |
| | | SVKGRFTISRDNAKNSVYLQMNSLRAEDTAVYYCYYFRTVAGSASGYWGQGTLVTVSS |
| 396 | 42E02 | EVQLVESGGGLVQPGGSLTLSCVASGSPSSINAYGWYRRAPGKQRELVAGISSDGSKVYSD |
| | | SVKGRFTISRDNAKNSVYLQMNSLRAEDTAVYYCYYFRTVSGSSYSYWGQGTLVTVSS |
| 397 | 42E05 | EVQLVESGGGLVQPGGSLTLSCVASGSTSTINAIGWYRRAPGKQRELVAGISSDGSKVYVD |
| | | SVKGRFTISRDNAKNSVYLQMNSLRAEDTAVYYCYYFINLKGSSMAYWGQGTLVTVSS |
| 398 | 42E06 | EVQLVESGGGLVQPGGSLTLSCVASGSTSSINAIGWYRRAPGKQRELVAGISSDGSKVYAD |
| | | SVKGRFTISRDNAKNSVYLQMNSLRAEDTAVYYCYYFRMVTGSYGGYWGQGTLVTVSS |
| 399 | 42E07 | EVQLVESGGGLVQPGGSLTLSCVASGSISSINAMGWYRRAPGKQRELVAGISSDGSSVYAD |
| | | SVKGRFTISRDNAKNSVYLQMNSLRAEDTAVYYCYYFKSSYGLPMRYWGQGTLVTVSS |
| 400 | 42F01 | EVQLVESGGGLVQPGGSLTLSCVASGSTQVNNAMAWYRRAPGKQRELVAGISSDGSQVYYG |
| | | SVKGRFTISRDNAKNSVYLQMNSLRAEDTAVYYCYYFKTVSGQSLRYWGQGTLVTVSS |
| 401 | 42F08 | EVQLVESGGGLVQPGGSLTLSCVASGSTASFNAMAWYRRAPGKQRELVAGISSDGSKVYTD |
| | | SVKGRFTISRDNAKNSVYLQMNSLRAEDTAVYYCYYFRTVTGRAARYWGQGTLVTVSS |
| 402 | 42F10 | EVQLVESGGGLVQPGGSLTLSCVASGSPLSINAIGWYRRAPGKQRELVAGISSDGSKVSAD |
| | | SVKGRFTISRDNAKNSVYLQMNSLRAEDTAVYYCYYFGPAIGASRTYWGQGTLVTVSS |
| 403 | 42G05 | EVQLVESGGGLVQPGGSLTLSCVASGSTTFINAIGWYRRAPGKQRELVAGISSDGSKVYED |
| | | SVKGRFTISRDNAKNSVYLQMNSLRAEDTAVYYCYYFRTVSGAPKSYWGQGTLVTVSS |
| 404 | 42G07 | EVQLVESGGGLVQPGGSLTLSCVASGSTSSINAIGWYRRAPGKQRELVAGISSDRSKVYAD |
| | | SVKGRFTISRDNAKNSVYLQMNSLRAEDTAVYYCYYFHTVSGSSMSYWGQGTLVTVSS |
| 405 | 42H05 | EVQLVESGGGLVQPGGSLTLSCVASGETDTINAVGWYRRAPGKQRELVAGISSDGSKVYAE |
| | | SVKGRFTISRDNAKNSVYLQMNSLRAEDTAVYYCYYFRRLEGYSNRYWGQGTLVTVSS |
| 406 | 42H08 | EVQLVESGGGLVQPGGSLTLSCVASGSTSPINAIGWYRRAPGKQRELVAGISSDGSVVTTE |
| | | SVKGRFTISRDNAKNSVYLQMNSLRAEDTAVYYCYYFRTGSGSSMGYWGQGTLVTVSS |
| 407 | 42H11 | EVQLVESGGGLVQPGGSLTLSCVASGSITSSNAMGWYRRAPGKQRELVAGISSDGSHVHQE |
| | | SVKGRFTISRDNAKNSVYLQMNSLRAEDTAVYYCYYFTTVTGSSMSYWGQGTLVTVSS |
| 408 | 51A01 | EVQLVESGGGLVQPGGSLTLSCAASRYSVSNLSMAWYRQAPGKKRELVAGISADGSTVYVE |
| | | SVKGRFTISRDNAKNSVYLQMNSLRAEDTAVYYCYAYYWTERRPYWGQGTLVTVSS |
| 409 | 51A02 | EVQLVESGGGLVQPGDSLTLSCAASMSTVSVLSMAWYRQAPGKKRELVAGISSDGSTVYID |
| | | SVKGRFTISRDNAKNSVYLQMNSLRAEDTAIYYCYAYSWDDAHPYWGQGTLVTVSS |
| 410 | 51A03 | EVQLVESGGGLVQPGGSLTLSCAASDSYVSLLSMAWYRQAPGKKRELVAGISVDGSTHYVA |
| | | SVKGRFTISRDNAKNSVYLQMNSLRAEDTAVYYCYAYRWMTRLTYWGQGTLVTVSS |
| 411 | 51A05 | EVQLVESGGGLVQPGGSLTLSCAASDSAVSVLSIAWYRQAPGKKRELVAGISTDGSKHYID |
| | | SVKGRFTISRDNAKNSVYLQMNSLRAEDTAVYYCYAYDWADAQPYWGQGTLVTVSS |
| 412 | 51B01 | EVQLVESGGGLVQPGGSLTLSCAASHSSVTSLSLAWYRQAPGKKRELVAGISYDGSKYYAE |
| | | SVKGRFTISRDNAKNSVYLQMNSLRAEDTAVYYCYAYSWTDRLPYWGQGTLVTVSS |
| 413 | 51B04 | EVQLVESGGGLVQPGGSLTLSCAASDSVVKFLSMAWYRQAPGKKRELVAGISANGSRTYME |
| | | SVKGRFTISRDNAKNSVYLQMNSLRAEDTAVYYCYAYRWATRLPYWGQGTLVTVSS |
| 414 | 51B11 | EVQLVESGGGLVQPGGSLTLSCAASDPSVWNLSMAWYRQAPGKKRELVAGISPDGSTDYVD |
| | | SVKGRFTISRDNAKNSVYLQMNSLRAEDTAVYYCYAYKWSNRLPYWGQGTLVTVSS |
| 415 | 51C02 | EVQLVESGGGLVQPGGSLTLSCAASGTSVMLLSLAWYRQAPGKKRELVAGISPNGSAVYTE |
| | | SVKGRFTISRDNAKNSVYLQMNSLRAEDTAVYYCYAYGWKTRQPYWGQGTLVTVSS |
| 416 | 51D01 | EVQLVESGGGLVQPGGSLTLSCAASSSPVSNLSLAWYRQAPGKKRELVAGISPDGSTAYME |
| | | SVKGRFTISRDNAKNSVYLQMNSLRAEDTAVYYCYAYRWPNRRGYWGQGTLVTVSS |
| 417 | 51D03 | EVQLVESGGGLVQPGGSLTLSCAASWRSVLLLSVAWYRQAPGKKRELVAGISNDGSTDYID |
| | | SVKGRFTISRDNAKNSVYLQMNSLRAEDTAVYYCYAYDWTTRQRYWGQGTLVTVSS |
| 418 | 51E02 | EVQLVESGGGLVQPGGSLTLSCAASSSSVQYLSMAWYRQAPGKKRELVAGISTDGSAVYED |
| | | SVKGRFTISRDNAKNSVYLQMNSLRAEDTAVYYCYAYNWSYAQPYWGQGTLVTVSS |
| 419 | 51E03 | EVQLVESGGGLVQPGGSLTLSCAASGTSVSLLSLAWYRQAPGKKRELVAGISTGGSTHYIE |
| | | SVKGRFTISRDNAKNSVYLQMNSLRAEDTAVYYCYAYNWTDSLQYWGQGTLVTVSS |
| 420 | 51E05 | EVQLVESGGGLVQPGGSLTLSCAASLSSVSNLSIAWYRQAPGKKRELVAGISTDGSTVYID |
| | | SVKGRFTISRDNAKNSVYLQMNSLRAEDTAVYYCYAYSWTTSLPYWGQGTLVTVSS |
| 421 | 51F01 | EVQLVESGGGLVQPGGSLTLSCAASMYSVSFLSMAWYRQAPGKKRELVAGISNEGSTYYMD |
| | | SVKGRFTISRDNAKNSVYLQMNSLRAEDTAVYYCYAYKWRSRSTYWGQGTLVTVSS |
| 422 | 51F02 | EVQLVESGGGLVQPGGSLTLSCAASKSSVSHLSLAWYRQAPGKKRELVAGISADGSHVYTN |
| | | SVKGRFTISRDNAKNSVYLQMNSLRAEDTAVYYCYAYSQTTRDPYWGQGTLVTVSS |
| 423 | 51F03 | EVQLVESGGGLVQPGGSLTLSCAASYTSVLDLSIAWYRQAPGKKRELVAGISDDGSRYYTD |
| | | SVKGRFTISRDNAKNSVYLQMNSLRAEDTAVYYCYAYRWTARDTYWGQGTLVTVSS |
| 424 | 51F04 | EVQLVESGGGLVQPGGSLTLSCAASMSDVSFLSMAWYRQAPGKKRELVAGISAEGSTLYME |
| | | SVKGRFTISRDNAKNSVYLQMNSLRAEDTAVYYCYAYRWTSRLSYWGQGTLVTVSS |
| 425 | 51G02 | EVQLVESGGGLVQPGGSLTLSCAASESSVSFLSSAWYRQAPGKKRELVAGISTDGSTVYID |
| | | SVKGRFTISRDNAKNSVYLQMNSLRAEDTAVYYCYAYSWTTRSRYWGQGTLVTVSS |
| 426 | 51G04 | EVQLVESGGGLVQPGGSLTLSCAASGDSVSLLSMAWYRQAPGKKRELVAGISANGSTSYID |
| | | SVKGRFTISRDNAKNSVYLQMNSLRAEDTAVYYCYAYNWTSRYRYWGQGTLVTVSS |
| 427 | 51G10 | EVQLVESGGGLVQPGGSLTLSCAASGSDVWYLSLAWYRQAPGKKRELVAGISDDGSRHYIE |
| | | SVKGRFTISRDNAKNSVYLQMNSLRAEDTAVYYCYAYSWKTRFPYWGQGTLVTVSS |
| 428 | 51H04 | EVQLVESGGGLVQPGGSLTLSCAASKSAVAFLSIAWYRQAPGKKRELVAGISPDGSTVYIE |
| | | SVKGRFTISRDNAKNSVYLQMNSLRAEDTAVYYCYAYSWTTRYPYWGQGTLVTVSS |
| 429 | 51H05 | EVQLVESGGGLVQPGGSLTLSCAASFSAVAYLSMAWYRQAPGKKRELVAGISDDGSTVYVD |
| | | SVKGRFTISRDNAKNSVYLQMNSLRAEDTAVYYCYAYEWTNALPYWGQGTLVTVSS |
| 430 | 52B01 | EVQLVESGGGLVQPGGSLTLSCAASVYSVYDLSTAWYRQAPGKKRELVAGISDDGSTVYED |
| | | SVKGRFTISRDNAKNSVYLQMNSLRAEDTAVYYCYAYSWITRSPYWGQGTLVTVSS |
| 431 | 52C04 | EVQLVESGGGLVQPGGSLTLSCAASGDSVSFLSMAWYRQAPGKKRELVAGISDEGSTVYIG |
| | | SVKGRFTISRDNAKNSVYLQMNSLRAEDTAVYYCYAYSWTTRRQYWGQGTLVTVSS |
| 432 | 52D04 | EVQLVESGGGLVQPGGSLTLSCAASSSSVSLLSLAWYRQAPGKKRELVAGISDDGSIVYMD |
| | | SVKGRFTISRDNAKNSVYLQMNSLRAEDTAVYYCYAYSWITRSPYWGQGTLVTVSS |
| 433 | 53A04 | EVQLVESGGGLVQPGGSLTLSCAASADSVSFLSIAWYRQAPGKKRELVAGISDDGSKHYED |
| | | SVKGRFTISRDNAKNSVYLQMNSLRAEDTAVYYCYAYRWEESRQYWGQGTLVTVSS |
| 434 | 53A05 | EVQLVESGGGLVQPGGSLTLSCAASASSVTLLSIAWYRQAPGKKRELVAGISTDGSTDYLH |
| | | SVKGRFTISRDNAKNSVYLQMNSLRAEDTAVYYCYAYTWTTRLPYWGQGTLVTVTS |
| 435 | 53A09 | EVQLVESGGGLVQPGGSLTLSCAASADSVSFLSIAWYRQAPGKKRELVAGISDDGSKHYFD |
| | | SVKGRFTISRDNAKNSVYLQMNSLRAEDTAVYYCYAYRWEESRQYWGQGTLVTVSS |
| 436 | 53B05 | EVQLVESGGGLVQPGGSLTLSCAASGTSVWLLSMAWYRQAPGKKRELVAGISYDGSTVYVE |
| | | SVKGRFTISRDNAKNSVYLQMNSLRAEDTAVYYCYAYSWTTRQPYWGQGTLVTVSS |
| 437 | 53B06 | EVQLVESGGGLVQPGGSLTLSCAASGSSVSILSIAWYRQAPGKKRELVAGISDDGSTVYID |
| | | SVKGRFTISRDNAKNSVYLQMNSLRAEDTAVYYCYAYVWGTRLPYWGQGTLVTVSS |
| 438 | 53C03 | EVQLVESGGGLVQPGGSLTLSCAASGTAVSNLSIAWYRQAPGKKRELVAGISDDGSTVYVD |
| | | SVKGRFTISRDNAKNSVYLQMNSLRAEDTAVYYCYAYEWTNALPYWGQGTLVTVSS |
| 439 | 53C04 | EVQLVESGGGLVQPGGSLTLSCAASGSAVSMLSLAWYRQAPGKKRELVAGISDDGSQVYID |
| | | SVKGRFTISRDNAKNSVYLQMNSLRAEDTAVYYCYAYRWEDALTYWGQGTLVTVSS |
| 440 | 53H03 | EVQLVESGGGLVQPGGSLTLSCAASGMTVFFLSMAWYRQAPGKKRELVAGISVDGSTVYSD |
| | | SVKGRFTISRDNAKNSVYLQMNSLRAEDTAVYYCYAYSWTTRYPYWGQGTLVTVSS |
| 441 | 53H04 | EVQLVESGGGLVQPGGSLTLSCAASQYSVTFLSVAWYRQAPGKKRELVAGISDDGSNVYID |
| | | SVKGRFTISRDNAKNSVYLQMNSLRAEDTAVYYCYAYSWIDSLRYWGQGTLVTVSS |
| 442 | 54B05 | EVQLVESGGGLVQPGGSLTLSCAASGETVSFLSLAWYRQAPGKKRELVAGISTDGSTVYFV |
| | | SVKGRFTISRDNAKNSVYLQMNSLRAEDTAVYYCYAYSWTTPRAYWGQGTLVTVSS |
| SEQ | | |
| ID NO. | name | CDR1 |
| 443 | DL1 | GSIFSIASMG |
| 444 | DL74 | GSIFSIASMG |
| 445 | DL31 | GSIFSIASMA |
| 446 | DL3 | ESIFSINVMA |
| 447 | DL80 | GSSFSITSMA |
| 448 | DL18 | SSIFSISSMS |
| 449 | DL94 | SSIFSISSMS |
| 450 | DL17 | GSTLNIKIMA |
| 451 | DL46 | GSTLNIKIMA |
| 452 | DL15 | GSTFNIKIMA |
| 453 | DL26 | GSTFNIKLMA |
| 454 | DL83 | GSTFNFKIMA |
| 455 | DL5 | GFMFSSYSMS |
| 456 | DL22 | GFMFSSYSMS |
| 457 | DL85 | GFTFSSHSMS |
| 458 | DL69 | GSSFSHNTMG |
| 459 | DL27 | GGRFSYATMG |
| 460 | DL51 | GSRFSYATMG |
| 461 | DL54 | GSTFTSNVMG |
| 462 | DL11 | GSSVSFLSMA |
| 463 | DL19 | GSSVSFLSMA |
| 464 | DL68 | GSSVSFLSMA |
| 465 | DL14 | GSSVSFLSMA |
| 466 | DL67 | GSSVSFLSMA |
| 467 | DL56 | GSSVSFLSMA |
| 468 | DL13 | GSSVSFLSMA |
| 469 | DL77 | GSSVSFLSIA |
| 470 | DL79 | GSSVSFLSMA |
| 471 | DL20 | GSSVSFLSMA |
| 472 | DL41 | GSSVSFLSMA |
| 473 | DL59 | GSSVSFLSMA |
| 474 | DL16 | GSSVSFLSMA |
| 475 | DL6 | GSSVSFLSMA |
| 476 | DL84 | GFTLDYYAIG |
| 477 | DL2 | GSTSSINAMG |
| 478 | DL43 | GSTSSINAMG |
| 479 | DL92 | GITSSVYSMG |
| 480 | DL10 | GRTSMFNSMG |
| 481 | DL82 | GRTSMVNSMG |
| 482 | DL23 | GSVSMFNSMG |
| 483 | DL42 | GSIFSIAVMG |
| 484 | DL45 | SGIFSDMSMV |
| 485 | DL58 | GSISSIIVMG |
| 486 | DL70 | GSISSIIVMG |
| 487 | DL89 | GSIFTTNSMG |
| 488 | DL38 | GSREISTMG |
| 489 | DL52 | GSREISTMG |
| 490 | DL64 | GSREISTMG |
| 491 | DL33 | GSREISTMG |
| 492 | DL12 | GSIFRGAAMY |
| 493 | DL29 | GSISSFNFMS |
| 494 | DL61 | GTIFTASTMG |
| 495 | DH1 | GSIFSIASMG |
| 496 | DH10 | GRTSMFNSMG |
| 497 | DH11 | GSSVSFLSMA |
| 498 | DH12 | GSIFRGAAMY |
| 499 | DH15 | GSTFNIKTMA |
| 500 | DH17 | GSTLNIKIMA |
| 501 | DH18 | SSIFSISSMS |
| 502 | DH2 | GSTSSINAMG |
| 503 | DH22 | GFMFSSYSMS |
| 504 | DH23 | GSVSMFNSMG |
| 505 | DH27 | GGRFSYATMG |
| 506 | DH29 | GSISSFNFMS |
| 507 | DH3 | ESIFSINVMA |
| 508 | DH38 | GSREISTMG |
| 509 | DH42 | GSIFSIAVMG |
| 510 | DH43 | GSTSSINAMG |
| 511 | DH45 | SGIFSDMSMV |
| 512 | DH5 | GFMFSSYSMS |
| 513 | DH51 | GSRFSYATMG |
| 514 | DH54 | GSTFTSNVMG |
| 515 | DH56 | GSSVSFLSMA |
| 516 | DH58 | GSISSIIVMG |
| 517 | DH6 | GSSVSFLSMA |
| 518 | DH61 | GTIFTASTMG |
| 519 | DH67 | GSSVSFLSMA |
| 520 | DH69 | GSSFSHNTMG |
| 521 | DH70 | GSISSIIVMG |
| 522 | DH80 | GSSFSITSMA |
| 523 | DH82 | GRTSMVNSMG |
| 524 | DH83 | GSTFNFKIMA |
| 525 | DH84 | GFTLDYYAIG |
| 526 | DH89 | GSIFTTNSMG |
| 527 | DH92 | GITSSVYSMG |
| 528 | DH94 | SSIFSISSMS |
| 529 | 1A01 | GFTSSINAMG |
| 530 | 1A03 | GSTSSINAMA |
| 531 | 1A04 | GSTSSINAMG |
| 532 | 1A05 | GSPSSINAMG |
| 533 | 1A06 | GSTSSINAMG |
| 534 | 1A07 | GSISSINAMG |
| 535 | 1A09 | GSTSSINAMA |
| 536 | 1A010 | GSTSSINAYG |
| 537 | 1A011 | GSTSSINAIG |
| 538 | 1A012 | GSTSSINAMA |
| 539 | 1B01 | GSTSIINAMG |
| 540 | 1B02 | GSTSSINAMG |
| 541 | 1B03 | GKTSSINAMA |
| 542 | 1B04 | GTTSSINAMG |
| 543 | 1B05 | GSTSSINAMA |
| 544 | 1B07 | GSGSSINAMG |
| 545 | 1B08 | GTTSSINAMG |
| 546 | 1B09 | GSTSSINAMA |
| 547 | 1B010 | GSTSRINAMG |
| 548 | 1B011 | GSTSRINAMG |
| 549 | 1C01 | GSTSSINAMG |
| 550 | 1C02 | GSTSSINAMA |
| 551 | 1C03 | GSTSSINAMA |
| 552 | 1C04 | GNTSSINAMA |
| 553 | 1C05 | GSTSSINAMA |
| 554 | 1C06 | GSTSIINAMG |
| 555 | 1C07 | GSTSSINAMA |
| 556 | 1C08 | GSTSRINAMG |
| 557 | 1C010 | GSTSRINAMG |
| 558 | 1C011 | GTTSSINAMG |
| 559 | 1C012 | GITSSINAMG |
| 560 | 1D01 | GSTSDINAMG |
| 561 | 1D02 | GSTSSINAMA |
| 562 | 1D03 | GSTSSINAIG |
| 563 | 1D04 | GSTSSKNAMG |
| 564 | 1D06 | GSTSSINAMG |
| 565 | 1D08 | GLTSSINAMG |
| 566 | 1D09 | GSTSSINAMA |
| 567 | 1D010 | GSTSSNNAMA |
| 568 | 1D011 | GSTSSINAMA |
| 569 | 1D012 | GSTSHINAMG |
| 570 | 1E02 | GQTSSINAMG |
| 571 | 1E04 | GSTSRINGMG |
| 572 | 1E05 | GSTSVINAMA |
| 573 | 1E07 | GSTSSINAMA |
| 574 | 1E08 | GKTSSINAMG |
| 575 | 1E09 | GSTSSINAMA |
| 576 | 1E010 | GSVSSINAMG |
| 577 | 1E011 | GNTSSINAMG |
| 578 | 1E012 | GSTSSTNAMG |
| 579 | 1F01 | GSTSSINAMG |
| 580 | 1F02 | GSTSSINAMA |
| 581 | 1F04 | GGTSSINAMG |
| 582 | 1F05 | GSTRSINAMG |
| 583 | 1F06 | GTTSSINAMG |
| 584 | 1F07 | GSTSSINAMG |
| 585 | 1F08 | GSTSSINAMA |
| 586 | 1F09 | GNTSSINAMG |
| 587 | 1F010 | GSTSRINAMG |
| 588 | 1F011 | GSTSSINAIG |
| 589 | 1F012 | GLTSSINAMG |
| 590 | 1G01 | GSTSSINAMA |
| 591 | 1G04 | GSTSSTNAMG |
| 592 | 1G05 | GSTSSINAIG |
| 593 | 1G06 | GSTSSINAIG |
| 594 | 1G07 | GSTSSINAMG |
| 595 | 1G09 | GSTSSINAMG |
| 596 | 1G011 | GSTSSINAMA |
| 597 | 1H01 | GSTSSINAMA |
| 598 | 1H02 | GSKSSINAMG |
| 599 | 1H06 | GTTSSINAMG |
| 600 | 1H07 | GSTSSINAFG |
| 601 | 1H08 | GSTFSINAMG |
| 602 | 1H010 | GSTRSINAMG |
| 603 | 1H011 | GSTSSINAIG |
| 604 | 1H012 | GSTSSINAMG |
| 605 | 2A01 | GSTSSINAMG |
| 606 | 2A03 | GTTSSINAMG |
| 607 | 2A04 | GSTSSINAMA |
| 608 | 2A05 | GRTSSINAMG |
| 609 | 2A06 | GSTSSRNAMG |
| 610 | 2A08 | GSTKSINAMG |
| 611 | 2A09 | GSTSSRNAMG |
| 612 | 2A011 | GSTSSINAIG |
| 613 | 2B01 | GSTSLINAMG |
| 614 | 2B02 | GSTSSINAMA |
| 615 | 2B03 | GSTSSINAMG |
| 616 | 2B05 | GTTSSINAMG |
| 617 | 2B07 | GSTSSINAFG |
| 618 | 2B010 | GSTSSRNAMG |
| 619 | 2B011 | GNTSSINAMG |
| 620 | 2B012 | GTTSSINAMG |
| 621 | 2C01 | GSTASINAMG |
| 622 | 2C02 | GSTSSINAVG |
| 623 | 2C04 | GSTSSRNAMG |
| 624 | 2C06 | GSTNSINAMG |
| 625 | 2C07 | GSTSSINAMA |
| 626 | 2C08 | GSTSRINAMG |
| 627 | 2C09 | GSTSNINAMG |
| 628 | 2C010 | GSTSKINAMG |
| 629 | 2D02 | GSTSSINALG |
| 630 | 2D03 | GKTSSINAMG |
| 631 | 2D04 | GSTSSINAVG |
| 632 | 2D05 | GSTSRINAMG |
| 633 | 2D06 | GSTSSINAMG |
| 634 | 2D07 | GSTSSINAVG |
| 635 | 2D09 | GTTSSINAMG |
| 636 | 2D010 | GSTSSINAMG |
| 637 | 2D011 | GTTSSINAMG |
| 638 | 2D012 | GKTSSINAMG |
| 639 | 2E01 | GSTSSINAMG |
| 640 | 2E02 | GSTSAINAMG |
| 641 | 2E05 | GSPSSINAYG |
| 642 | 2E06 | GSTSSINAMG |
| 643 | 2E08 | GSRSSINAMG |
| 644 | 2E09 | GSVSSINAMG |
| 645 | 2E010 | GSTSSINAMA |
| 646 | 2E011 | GSTSSINAIG |
| 647 | 2F01 | GSTSSINAMG |
| 648 | 2F02 | GSTSSINAVG |
| 649 | 2F03 | GSTSSINAMA |
| 650 | 2F06 | GSTSSINAYG |
| 651 | 2F07 | GSTSSINAVG |
| 652 | 2F08 | GSKSSINAMG |
| 653 | 2F09 | GSTSSINAMA |
| 654 | 2F11 | GSVSSINAMG |
| 655 | 2G03 | GSTSSINAMG |
| 656 | 2G04 | GSTSSINAMG |
| 657 | 2G07 | GSTSSINAMA |
| 658 | 2G08 | GSTSYINAMG |
| 659 | 2G09 | GSTSSINAMG |
| 660 | 2G011 | GSTSSINAMG |
| 661 | 2H010 | GSTSSINAMG |
| 662 | 2H011 | GSTSRINAMG |
| 663 | 2H02 | GSTSSINAMA |
| 664 | 2H03 | GSTSSINAMA |
| 665 | 2H04 | GSTSSINAMG |
| 666 | 2H06 | GSTSTINAMG |
| 667 | 2H07 | GSTSSINAVG |
| 668 | 2H08 | GSTSSINAMG |
| 669 | 2E05-M106Y | GSPSSINAYG |
| 670 | 2E05-M106Q | GSPSSINAYG |
| 671 | 3A01 | GSSVKFLSMA |
| 672 | 3A02 | GSSVSFLSLA |
| 673 | 3A03 | GSRVSFLSMA |
| 674 | 3A04 | GSQVSFLSMA |
| 675 | 3A05 | GSSVSFLSMA |
| 676 | 3A06 | GSKVSFLSMA |
| 677 | 3A08 | GSSVGFLSMA |
| 678 | 3A09 | GSSVSFLSMA |
| 679 | 3A010 | GSRVSFLSMA |
| 680 | 3A011 | GSSVSFLSLA |
| 681 | 3B01 | GSSVSFLSMA |
| 682 | 3B02 | GSSVQFLSMA |
| 683 | 3B04 | GSNVSFLSMA |
| 684 | 3B05 | GSSVKFLSMA |
| 685 | 3B06 | GKSVSFLSMA |
| 686 | 3B07 | GSRVSFLSMA |
| 687 | 3B09 | GSHVSFLSMA |
| 688 | 3B010 | GSSVSFLSMA |
| 689 | 3B011 | GSSVSFLSMA |
| 690 | 3C01 | GSSVRFLSMA |
| 691 | 3C02 | GSSVRFLSMA |
| 692 | 3C03 | GSSVRFLSMA |
| 693 | 3C04 | GSHVSFLSMA |
| 694 | 3C05 | GTSVSFLSMA |
| 695 | 3C06 | GTSVSFLSIA |
| 696 | 3C08 | GSSVKFLSMA |
| 697 | 3C09 | GSSVSFLSMA |
| 698 | 3C011 | GSSVRFLSMA |
| 699 | 3D01 | GSSVSFLSMA |
| 700 | 3D02 | GSSVRELSMA |
| 701 | 3D03 | GSSVVELSMA |
| 702 | 3D05 | GSSVRELSMA |
| 703 | 3D07 | GSSVRFLSMA |
| 704 | 3D08 | GSSVRFLSMA |
| 705 | 3D09 | GSSVSRLSMA |
| 706 | 3D010 | GSSKSFLSMA |
| 707 | 3D011 | GSSVSRLSMA |
| 708 | 3E01 | GSSVKFLSMA |
| 709 | 3E02 | GSGVRFLSMA |
| 710 | 3E03 | GSSVRFLSMA |
| 711 | 3E04 | GSSVHFLSMA |
| 712 | 3E09 | GSSVRFLSMA |
| 713 | 3E011 | GSKVSFLSMA |
| 714 | 3F03 | GSSVSFLSMA |
| 715 | 3F05 | GSKVSFLSMA |
| 716 | 3F06 | GSRVSFLSMA |
| 717 | 3F08 | GSRVSFLSMA |
| 718 | 3F09 | GSSVRFLSMA |
| 719 | 3F010 | YSSVSRLSMA |
| 720 | 3F011 | GSSVSFLSMA |
| 721 | 3G01 | GSSVSFLSMA |
| 722 | 3G02 | GSSVSFLSMA |
| 723 | 3G04 | GTSVSFLSMA |
| 724 | 3G06 | GSSVKFLSMA |
| 725 | 3G07 | GSSVSFLSMA |
| 726 | 3G08 | GSRVSFLSMA |
| 727 | 3G09 | GSSVSVLSMA |
| 728 | 3G010 | GSSVSFLSMA |
| 729 | 3G011 | GSRVSFLSMA |
| 730 | 3H01 | GSSVKFLSMA |
| 731 | 3H03 | GSSVRFLSMA |
| 732 | 3H06 | GSSVSQLSMA |
| 733 | 3H07 | GSRVSFLSMA |
| 734 | 3H09 | KSSVSFLSMA |
| 735 | 3H010 | GSSVSFLSMA |
| 736 | 3H011 | GSSVKFLSMA |
| 737 | 4A01 | GSSVRFLSMA |
| 738 | 4A02 | GSSVRFLSMA |
| 739 | 4A04 | GSRVSFLSMA |
| 740 | 4A05 | GSSVSFLSLA |
| 741 | 4A06 | GSSVRFLSMA |
| 742 | 4A07 | GSKVSFLSMA |
| 743 | 4A08 | GSSVSFLSMA |
| 744 | 4A010 | GSSVRFLSMA |
| 745 | 4A011 | GSKVSFLSMA |
| 746 | 4A09 | GSSVKFLSMA |
| 747 | 4B01 | GSSVKFLSMA |
| 748 | 4B02 | GSRVSFLSMA |
| 749 | 4B04 | GSSVLFLSMA |
| 750 | 4B05 | GSRVSFLSMA |
| 751 | 4B06 | GSRVSFLSMA |
| 752 | 4B07 | GSSVGFLSMA |
| 753 | 4B08 | GSSVSFMSMA |
| 754 | 4B09 | GSSVSFLSMA |
| 755 | 4B011 | GSSVTFLSMA |
| 756 | 4C01 | GSSVRFLSMA |
| 757 | 4C02 | GSKVSFLSMA |
| 758 | 4C03 | GSKVSFMSMA |
| 759 | 4C05 | GSSVSNLSMA |
| 760 | 4C06 | NSSVSKLSMA |
| 761 | 4C07 | GSKVSFLSMA |
| 762 | 4C08 | GSQVSFLSMA |
| 763 | 4C010 | GSKVSFMSMA |
| 764 | 4C011 | GSRVSFLSMA |
| 765 | 4D01 | GSSVRFLSMA |
| 766 | 4D02 | GSKVSFLSMA |
| 767 | 4D03 | GSSVRFLSMA |
| 768 | 4D04 | GSSVSFLSIA |
| 769 | 4D05 | GSSSSFLSMA |
| 770 | 4D06 | GSSVKFLSMA |
| 771 | 4D08 | GSSVNFLSMA |
| 772 | 4D09 | GSSVKFLSMA |
| 773 | 4D010 | GSSVSFLSMA |
| 774 | 4D011 | GSSVRFLSMA |
| 775 | 4E01 | GSSVSFLSVA |
| 776 | 4E02 | GSQVSFLSMA |
| 777 | 4E06 | GTSVSFLSMA |
| 778 | 4E07 | GSRVSFLSMA |
| 779 | 4E08 | GSSVKFLSMA |
| 780 | 4E09 | GSSVSFLSSA |
| 781 | 4E010 | GSSVKFLSMA |
| 782 | 4E011 | GSSVSFLSMA |
| 783 | 4F02 | GSTVSFLSMA |
| 784 | 4F03 | GSSVQFLSMA |
| 785 | 4F04 | RSSVSFLSMA |
| 786 | 4F08 | GSKVSFLSMA |
| 787 | 4F09 | GSRVSFLSMA |
| 788 | 4F010 | GSSVSFLSMA |
| 789 | 4F011 | GSKVSFLSMA |
| 790 | 4G01 | GSSVRFLSMA |
| 791 | 4G02 | GSSVKFLSMA |
| 792 | 4G03 | GSSVKFLSMA |
| 793 | 4G05 | GSSVSILSMA |
| 794 | 4G07 | GSSVSFLSVA |
| 795 | 4G08 | GSSVRFLSMA |
| 796 | 4G09 | GSRVSFLSMA |
| 797 | 4G010 | GHSVSFLSMA |
| 798 | 4G011 | GSSVRFLSMA |
| 799 | 4H01 | GSSVSFLSMA |
| 800 | 4H03 | GSRVSFLSMA |
| 801 | 4H04 | GSSVKFLSMA |
| 802 | 4H05 | GSSVSRLSMA |
| 803 | 4H06 | GRSVSFLSMA |
| 804 | 4H07 | GRSVSFLSMA |
| 805 | 4H08 | GSSVKFLSMA |
| 806 | 4H09 | GSSVSKLSMA |
| 807 | 4H011 | GSSVSRLSMA |
| 808 | 4D09-M34L | GSSVKFLSLA |
| 809 | 4H11-M34L | GSSVSRLSLA |
| 810 | 41B11 | GTSSSINAMG |
| 811 | 41C02 | GTTSSINAIG |
| 812 | 41D01 | GSTSSINAMA |
| 813 | 41D02 | GQTYRVNAFG |
| 814 | 41D03 | GSTSSINAMA |
| 815 | 41D07 | GSASLTNATG |
| 816 | 41E01 | GYPSLNNAMG |
| 817 | 41E02 | GSSSTINAIG |
| 818 | 41F07 | GSTSYINAMG |
| 819 | 41G01 | GSTSSVNALG |
| 820 | 42A03 | GSTSLSNAVG |
| 821 | 42A06 | GSTSSTNAIG |
| 822 | 42A07 | GLTSTINAMG |
| 823 | 42A08 | GVSPSKNAIG |
| 824 | 42A11 | GSTSSINAVG |
| 825 | 42B06 | GSTTMNNAMA |
| 826 | 42B10 | GSTSKINAIG |
| 827 | 42C01 | GQTTALNAMG |
| 828 | 42C03 | GATSSINAIG |
| 829 | 42C07 | GSTSTINAMG |
| 830 | 42C08 | GSTSSINAMG |
| 831 | 42C10 | GSTSLVNAMG |
| 832 | 42C11 | GSTSLNNAIG |
| 833 | 42D05 | GSTSPVNAMA |
| 834 | 42D06 | GTTSSMNAIG |
| 835 | 42D07 | GETSSINAMA |
| 836 | 42D08 | GSTSTINAIG |
| 837 | 42E01 | GSTYSMNAMG |
| 838 | 42E02 | GSPSSINAYG |
| 839 | 42E05 | GSTSTINAIG |
| 840 | 42E06 | GSTSSINAIG |
| 841 | 42E07 | GSISSINAMG |
| 842 | 42F01 | GSTQVNNAMA |
| 843 | 42F08 | GSTASFNAMA |
| 844 | 42F10 | GSPLSINAIG |
| 845 | 42G05 | GSTTFINAIG |
| 846 | 42G07 | GSTSSINAIG |
| 847 | 42H05 | GETDTINAVG |
| 848 | 42H08 | GSTSPINAIG |
| 849 | 42H11 | GSITSSNAMG |
| 850 | 51A01 | RYSVSNLSMA |
| 851 | 51A02 | MSTVSVLSMA |
| 852 | 51A03 | DSYVSLLSMA |
| 853 | 51A05 | DSAVSVLSIA |
| 854 | 51B01 | HSSVTSLSLA |
| 855 | 51B04 | DSVVKFLSMA |
| 856 | 51B11 | DPSVWNLSMA |
| 857 | 51C02 | GTSVMLLSLA |
| 858 | 51D01 | SSPVSNLSLA |
| 859 | 51D03 | WRSVLLLSVA |
| 860 | 51E02 | SSSVQYLSMA |
| 861 | 51E03 | GTSVSLLSLA |
| 862 | 51E05 | LSSVSNLSIA |
| 863 | 51F01 | MYSVSFLSMA |
| 864 | 51F02 | KSSVSHLSLA |
| 865 | 51F03 | YTSVLDLSIA |
| 866 | 51F04 | MSDVSFLSMA |
| 867 | 51G02 | ESSVSFLSSA |
| 868 | 51G04 | GDSVSLLSMA |
| 869 | 51G10 | GSDVWYLSLA |
| 870 | 51H04 | KSAVAFLSIA |
| 871 | 51H05 | FSAVAYLSMA |
| 872 | 52B01 | VYSVYDLSTA |
| 873 | 52C04 | GDSVSFLSMA |
| 874 | 52D04 | SSSVSLLSLA |
| 875 | 53A04 | ADSVSFLSIA |
| 876 | 53A05 | ASSVTLLSIA |
| 877 | 53A09 | ADSVSFLSIA |
| 878 | 53B05 | GTSVWLLSMA |
| 879 | 53B06 | GSSVSILSIA |
| 880 | 53C03 | GTAVSNLSIA |
| 881 | 53C04 | GSAVSMLSLA |
| 882 | 53H03 | GMTVFFLSMA |
| 883 | 53H04 | QYSVTFLSVA |
| 884 | 54B05 | GETVSFLSLA |
| SEQ | | |
| ID NO. | name | CDR2 |
| 885 | DL1 | VITSFSSTNYADSVKG |
| 886 | DL74 | VITSFSSTNYADSVKG |
| 887 | DL31 | AITSFSSTNYADSVKG |
| 888 | DL3 | RITSGGSTNYADSVKG |
| 889 | DL80 | AITSFGSTNYADSVKD |
| 890 | DL18 | AITTFDYTNYADSVKG |
| 891 | DL94 | AITSFGSTNYADSVKG |
| 892 | DL17 | TLTSGGNTNYADSVKG |
| 893 | DL46 | TLTSGGNTNYADSVKG |
| 894 | DL15 | TLTSGGNTNYADSVKG |
| 895 | DL26 | TLTSGGNTNYADSVKG |
| 896 | DL83 | SLTSEGLTNYRDSVKG |
| 897 | DL5 | AITTWGSTNYADSVKG |
| 898 | DL22 | AITSYGSTNYADSVKG |
| 899 | DL85 | AITTYGSTNYIDSVKG |
| 900 | DL69 | RITTFGTTNYADSVKG |
| 901 | DL27 | RITSSGFSTNYADSVKG |
| 902 | DL51 | RITSSGFSTNYADSVKG |
| 903 | DL54 | NMHSGGSTNYADSVKG |
| 904 | DL11 | GISVDGSTNYADSVKG |
| 905 | DL19 | GISVDGSTNYADSVKG |
| 906 | DL68 | GISVDGSTNYADSVKG |
| 907 | DL14 | GISVDGSTNYADSVKG |
| 908 | DL67 | GISVDGSTNYADSVKG |
| 909 | DL56 | GISTDGSTNYVDSVKG |
| 910 | DL13 | GISTDGTTNYVDSVKD |
| 911 | DL77 | GISTDGTTNYVDSVKD |
| 912 | DL79 | GISTDGTTNYVDSVKD |
| 913 | DL20 | GISTDGSTNYADSVKG |
| 914 | DL41 | GISTDGSTNYADSVKG |
| 915 | DL59 | GISTDGSTNYADSVKG |
| 916 | DL16 | GISSDGSTNYVDSVKG |
| 917 | DL6 | GISADGSTDYIDSVKG |
| 918 | DL84 | GISSDGSTHYVDSVKG |
| 919 | DL2 | GISSDGSKNYADSVKG |
| 920 | DL43 | GISSDGSKVYADSVKG |
| 921 | DL92 | GSSSDGSTHYVDSVRG |
| 922 | DL10 | IIRSGGSSNYADTVKG |
| 923 | DL82 | LITSGGSSNYADTVKG |
| 924 | DL23 | IITSGGSSNYADTVKG |
| 925 | DL42 | TIFDGSYTNYADSVKG |
| 926 | DL45 | SITTFGSTNYADPVKG |
| 927 | DL58 | TITRDGTRNYADSLKG |
| 928 | DL70 | TISRGGTRTYADSVKG |
| 929 | DL89 | LIGSAGSTKYADSVKG |
| 930 | DL38 | RITSGGITKYADSVKG |
| 931 | DL52 | RITSGGITKYADSVKG |
| 932 | DL64 | RITSGGITKYADSVKG |
| 933 | DL33 | RITSGGITKYADSVKG |
| 934 | DL12 | AITTSGNTSYADSVKG |
| 935 | DL29 | VITRGGATNYADSVKG |
| 936 | DL61 | SIAGDGRTNYAESTEG |
| 937 | DH1 | VITSFSSTNYADSVKG |
| 938 | DH10 | IIRSGGSSNYADTVKG |
| 939 | DH11 | GISVDGSTNYADSVKG |
| 940 | DH12 | AITTSGNTSYADSVKG |
| 941 | DH15 | TLTSGGNTNYADSVKG |
| 942 | DH17 | TLTSGGNTNYADSVKG |
| 943 | DH18 | AITTFDYTNYADSVKG |
| 944 | DH2 | GISSDGSKNYADSVKG |
| 945 | DH22 | AITSYGSTNYADSVKG |
| 946 | DH23 | IITSGGSSNYADTVKG |
| 947 | DH27 | RITSSGFSTNYADSVKG |
| 948 | DH29 | VITRGGATNYADSVKG |
| 949 | DH3 | RITSGGSTNYADSVKG |
| 950 | DH38 | RITSGGITKYADSVKG |
| 951 | DH42 | TIFDGSYTNYADSVKG |
| 952 | DH43 | GISSDGSKVYADSVKG |
| 953 | DH45 | SITTFGSTNYADPVKG |
| 954 | DH5 | AITTWGSTNYADSVKG |
| 955 | DH51 | RITSSGFSTNYADSVKG |
| 956 | DH54 | NMHSGGSTNYADSVKG |
| 957 | DH56 | GISTDGSTNYVDSVKG |
| 958 | DH58 | TITRDGTRNYADSLKG |
| 959 | DH6 | GISADGSTDYIDSVKG |
| 960 | DH61 | SIAGDGRTNYAESTEG |
| 961 | DH67 | GISVDGSTNYADSVKG |
| 962 | DH69 | RITTFGTTNYADSVKG |
| 963 | DH70 | TISRGGTRTYADSVKG |
| 964 | DH80 | AITSFGSTNYADSVKD |
| 965 | DH82 | LITSGGSSNYADTVKG |
| 966 | DH83 | SLTSEGLTNYRDSVKG |
| 967 | DH84 | GISSDGSTHYVDSVKG |
| 968 | DH89 | LIGSAGSTKYADSVKG |
| 969 | DH92 | GSSSDGSTHYVDSVRG |
| 970 | DH94 | AITSFGSTNYADSVKG |
| 971 | 1A01 | GISSDGSFVYADSVKG |
| 972 | 1A03 | GISSDGSKVYADSVKG |
| 973 | 1A04 | GISSDGSKVYEDSVKG |
| 974 | 1A05 | GISSDGSKVYADSVKG |
| 975 | 1A06 | GISSDGSSVYADSVKG |
| 976 | 1A07 | GISSDGSKVYADSVKG |
| 977 | 1A09 | GISSDGSKLYADSVKG |
| 978 | 1A010 | GISSDGSKVYADSVKG |
| 979 | 1A011 | GISSDGSKVYIDSVKG |
| 980 | 1A012 | GISSDGSKVYSDSVKG |
| 981 | 1B01 | GISSDGSKVIADSVKG |
| 982 | 1B02 | GISSDGSKIYADSVKG |
| 983 | 1B03 | GISSDGSKVYTDSVKG |
| 984 | 1B04 | GISSDGSLVYADSVKG |
| 985 | 1B05 | GISSDGSKVYADSVKG |
| 986 | 1B07 | GISSDGSKVYSDSVKG |
| 987 | 1B08 | GISSDGSKVYVDSVKG |
| 988 | 1B09 | GISSDGSKVYVDSVKG |
| 989 | 1B010 | GISSDGSKVYADSVKG |
| 990 | 1B011 | GISSDGSKVYADSVKG |
| 991 | 1C01 | GISSDGSKVYRDSVKG |
| 992 | 1C02 | GISSDGSKVYSDSVKG |
| 993 | 1C03 | GISSDNSKVYADSVKG |
| 994 | 1C04 | GISSDGSKVYADSVKG |
| 995 | 1C05 | GISSDGSKVYADSVKG |
| 996 | 1C06 | GISSDGSKVYEDSVKG |
| 997 | 1C07 | GISSDGSKVYADSVKG |
| 998 | 1C08 | GISSDGSKVYAVSVKG |
| 999 | 1C010 | GVSSDGSKVYADSVKG |
| 1000 | 1C011 | GISSDGSKVYEDSVKG |
| 1001 | 1C012 | GISSDGSKVYAGSVKG |
| 1002 | 1D01 | GISSDKSKVYADSVKG |
| 1003 | 1D02 | GISSNGSKVYADSVKG |
| 1004 | 1D03 | GISSDGSKVLADSVKG |
| 1005 | 1D04 | GISSDGSKVYADSVKG |
| 1006 | 1D06 | GISSDNSKVYADSVKG |
| 1007 | 1D08 | GISSDGSKVYADSVKG |
| 1008 | 1D09 | GISSDGSKVYTDSVKG |
| 1009 | 1D010 | GISSDGSKVYTDSVKG |
| 1010 | 1D011 | GISSDNSKVYADSVKG |
| 1011 | 1D012 | GISSDGSRVYADSVKG |
| 1012 | 1E02 | GISSDGSQVYADSVKG |
| 1013 | 1E04 | GISSDGSKAYADSVKG |
| 1014 | 1E05 | GISSDGSKVYAKSAKG |
| 1015 | 1E07 | GISSDGSKVYNDSVKG |
| 1016 | 1E08 | GISSDGSKVIADSVKG |
| 1017 | 1E09 | GISSDGSKVYTDSVKG |
| 1018 | 1E010 | GISSDGSKVYIDSVKG |
| 1019 | 1E011 | GISSDGSKVYYDSVKG |
| 1020 | 1E012 | GISSDGSKVYVDSVKG |
| 1021 | 1F01 | GISSDGSKVYGDSVKG |
| 1022 | 1F02 | GISSDQSKVYADSAKG |
| 1023 | 1F04 | GISSDGSKVYSDSVKG |
| 1024 | 1F05 | GISSDGSKVYADSVKG |
| 1025 | 1F06 | GISSDGSKVIADSVKG |
| 1026 | 1F07 | GISSDGSKVDADSVKG |
| 1027 | 1F08 | GISSDGSKVYKDSVKG |
| 1028 | 1F09 | GISSNGSKVYADSVKG |
| 1029 | 1F010 | GISSDGSKVYKDSVKG |
| 1030 | 1F011 | GISSDGSKVYADSVKG |
| 1031 | 1F012 | GISSDGSKVYQDSVKG |
| 1032 | 1G01 | GISSDGSKVYAESVKG |
| 1033 | 1G04 | GISSDGSKVLADSVKG |
| 1034 | 1G05 | GISSDGSKYYADSVKG |
| 1035 | 1G06 | GISSDGSKVYAVSVKG |
| 1036 | 1G07 | GISSDGSKVVADSVKG |
| 1037 | 1G09 | GISSDGSKVYADSVKG |
| 1038 | 1G011 | GISSDGSKVYADSVKG |
| 1039 | 1H01 | GISSDNSKVYADSVKG |
| 1040 | 1H02 | GISSDGSKVYAQSVKG |
| 1041 | 1H06 | GISSDGSKVYVDSVKG |
| 1042 | 1H07 | GISSDGSKVYSDSVKG |
| 1043 | 1H08 | GISSDGSKVLADSVKG |
| 1044 | 1H010 | GISSDGSKVYNDSVKG |
| 1045 | 1H011 | GISSDGSKVYNDSVKG |
| 1046 | 1H012 | GISSDGSKVYVDSVKG |
| 1047 | 2A01 | GISSDGSKVVADSVKG |
| 1048 | 2A03 | GISSDGSKVYGDSVKG |
| 1049 | 2A04 | GISSDGSKVYTDSVKG |
| 1050 | 2A05 | GISSDGSKVYNDSVKG |
| 1051 | 2A06 | GISSDGSKVTADSVKG |
| 1052 | 2A08 | GISSDGSKVYRDSVKG |
| 1053 | 2A09 | GISSNGSKVYSDSVKG |
| 1054 | 2A011 | GISSDGSKVYSDSVKG |
| 1055 | 2B01 | GISSDGSKVYADSVKG |
| 1056 | 2B02 | GISSDGSKVYADSVKG |
| 1057 | 2B03 | GISSDGSLVYADSVKG |
| 1058 | 2B05 | GISSDGTKVYADSVKG |
| 1059 | 2B07 | GISSDGSKVYADSVKG |
| 1060 | 2B010 | GISSDGSKLYLDSVKG |
| 1061 | 2B011 | GISSDGSRVYADSVKG |
| 1062 | 2B012 | GISSDGSKVYNDSVKG |
| 1063 | 2C01 | GISSDGSKVYADSVKG |
| 1064 | 2C02 | GISSDGSKVYVDSVKG |
| 1065 | 2C04 | GISSDGSKLYADSVKG |
| 1066 | 2C06 | GISSDGSKVYKDSVKG |
| 1067 | 2C07 | GISSDGSKVYADSVKG |
| 1068 | 2C08 | GISSDGSKVYQDSVKG |
| 1069 | 2C09 | GISSDGTKIYADSAKV |
| 1070 | 2C010 | GISSDRSKVYADSVKG |
| 1071 | 2D02 | GISSDGSLVYADSVKG |
| 1072 | 2D03 | GISSDGSKVYADSVKG |
| 1073 | 2D04 | GISSDGSKVYRDSVKG |
| 1074 | 2D05 | GISSDGSKVYADSVKG |
| 1075 | 2D06 | GISSDGSKVYSDSVKG |
| 1076 | 2D07 | GISSDGTKVYRDSVKG |
| 1077 | 2D09 | GISSDGSKVYNDSVKG |
| 1078 | 2D010 | GISSDGSKVYADSVKG |
| 1079 | 2D011 | GISSDGSKVYADSVKG |
| 1080 | 2D012 | GISSDGSKVYTDSVKG |
| 1081 | 2E01 | GISPDGTKAYADSAKV |
| 1082 | 2E02 | GISSDGSKVYVDSVKG |
| 1083 | 2E05 | GISSDGSKVYSDSVKG |
| 1084 | 2E06 | GISSDGSKVYASSVKG |
| 1085 | 2E08 | GISADGSKVYADSVKG |
| 1086 | 2E09 | GISSDGSKVYASSAKG |
| 1087 | 2E010 | GISSDGSKVYADSVKG |
| 1088 | 2E011 | GISSDGSSVYADSVKG |
| 1089 | 2F01 | GISSDGSKVYSDSVKG |
| 1090 | 2F02 | GISSDGSKVYAGSVKG |
| 1091 | 2F03 | GISSDNSKVYADSVKG |
| 1092 | 2F06 | GISSDGSAVYADSVKG |
| 1093 | 2F07 | GISSDGSSVYADSVKG |
| 1094 | 2F08 | GISSNGTKVYADSAKV |
| 1095 | 2F09 | GISSDGSKLYADSVKG |
| 1096 | 2F11 | GISSDGSKVYKDSVKG |
| 1097 | 2G03 | GISSDGSLVYADSVKG |
| 1098 | 2G04 | GISSDGSLVYADSVKG |
| 1099 | 2G07 | GISSDGSKVYADSVKG |
| 1100 | 2G08 | GISSDGSKVYADSVKG |
| 1101 | 2G09 | GVSSDGSKVYADSVKG |
| 1102 | 2G011 | GISRDGSKVYADSVKG |
| 1103 | 2H010 | GISSDGSKLYADSVKG |
| 1104 | 2H011 | GISSDGSKVYADSVKG |
| 1105 | 2H02 | GISSDGSKVYADSVKG |
| 1106 | 2H03 | GISSDGSKVYADSVKG |
| 1107 | 2H04 | GISSDTSKVYADSVKG |
| 1108 | 2H06 | GISSDGSKVYADSVKG |
| 1109 | 2H07 | GISSDGSTVYADSVKG |
| 1110 | 2H08 | GISKDGSKVYADSAKG |
| 1111 | 2E05- | GISSDGSKVYSDSVKG |
| | M106Y | |
| 1112 | 2E05- | GISSDGSKVYSDSVKG |
| | M106Q | |
| 1113 | 3A01 | GISADGSTDYIDSVKG |
| 1114 | 3A02 | GISADGSTAYIDSVKG |
| 1115 | 3A03 | GISRDGSTDYIDSVKG |
| 1116 | 3A04 | GISRDGSTDYIDSVKG |
| 1117 | 3A05 | GISEAGSTDYIDSVKG |
| 1118 | 3A06 | GISADGSTDYVDSVKG |
| 1119 | 3A08 | GISADGSTDYIRSVKG |
| 1120 | 3A09 | GISADGSVDYIDSVKG |
| 1121 | 3A010 | GISADGSTLYIDSVKG |
| 1122 | 3A011 | GISTDGSTDYIDSVKG |
| 1123 | 3B01 | GISGDGSTDYIDSVKG |
| 1124 | 3B02 | GISADGSTDYINSVKG |
| 1125 | 3B04 | GISARGSTDYIDSVKG |
| 1126 | 3B05 | GISADGSTTYIDSVKG |
| 1127 | 3B06 | GISKDGSTDYIDSVKG |
| 1128 | 3B07 | GISADGSTTYIDSVKG |
| 1129 | 3B09 | GISANGSTDYIDSVKG |
| 1130 | 3B010 | GISRDGSTDYIDSVKG |
| 1131 | 3B011 | GISADGSADYIDSVKG |
| 1132 | 3C01 | GISAHGSTDYIDSVKG |
| 1133 | 3C02 | GISADGSTIYIDSVKG |
| 1134 | 3C03 | GISRDGSTVYIDSVKG |
| 1135 | 3C04 | GISADGPTDYIDSVKG |
| 1136 | 3C05 | GISADGSTTYIDSVKG |
| 1137 | 3C06 | GISADGSTDYIASVKG |
| 1138 | 3C08 | GISLDGSTDYIDSVKG |
| 1139 | 3C09 | GISADGSTIYIDSVKG |
| 1140 | 3C011 | GISAHGSTDYIDSVKG |
| 1141 | 3D01 | GISRDGSTDYIDSVKG |
| 1142 | 3D02 | GISRDGSTDYIDSVKG |
| 1143 | 3D03 | GISADGSMDYIDSVKG |
| 1144 | 3D05 | GISADGSTDYIDSVKG |
| 1145 | 3D07 | GISADGSTDYIDSVKG |
| 1146 | 3D08 | GISANGSTDYIDSVKG |
| 1147 | 3D09 | GISANGSTTYIDSVKG |
| 1148 | 3D010 | GISADGSTSYIDSVKG |
| 1149 | 3D011 | GISADGSRDYIDSVKG |
| 1150 | 3E01 | GISADGSTMYIDSVKG |
| 1151 | 3E02 | GISPDGSTDYIDSVKG |
| 1152 | 3E03 | GISGDGSTDYIDSVKG |
| 1153 | 3E04 | GISRDGSTDYIDSVKG |
| 1154 | 3E09 | GISRDGSTDYIDSVKG |
| 1155 | 3E011 | GISRDGSTDYIDSVKG |
| 1156 | 3F03 | GISADGSTDYIDSVKG |
| 1157 | 3F05 | GISTDGSTDYIDSVKG |
| 1158 | 3F06 | GISADGSTSYIDSVKG |
| 1159 | 3F08 | GISADGSTLYIDSVKG |
| 1160 | 3F09 | GISRDGSTDYIDSVKG |
| 1161 | 3F010 | GISADGSTVYIDSVKG |
| 1162 | 3F011 | GISTDGSTDYIDSVKG |
| 1163 | 3G01 | GISADGSTLYIDSVKG |
| 1164 | 3G02 | GISADGRTDYIDSVKG |
| 1165 | 3G04 | GISADGSTIYIDSVKG |
| 1166 | 3G06 | GISADGSTLYIDSVKG |
| 1167 | 3G07 | GISRDGSTDYIDSVKG |
| 1168 | 3G08 | GISKDGSTDYIDSVKG |
| 1169 | 3G09 | GISADGSTDYIGSVKG |
| 1170 | 3G010 | GISVDGSTDYIDSVKG |
| 1171 | 3G011 | GISADGSTGYIDSVKG |
| 1172 | 3H01 | GISGDGSTTYIDSVKG |
| 1173 | 3H03 | GISTDGSTDYIDSVKG |
| 1174 | 3H06 | GISADGSTDYFDSVKG |
| 1175 | 3H07 | GISADGSTSYIDSVKG |
| 1176 | 3H09 | GISADGSTDYIDSVKG |
| 1177 | 3H010 | GISADGSTAYIDSVKG |
| 1178 | 3H011 | GISADGSTVYIDSVKG |
| 1179 | 4A01 | GISQDGSTDYIDSVKG |
| 1180 | 4A02 | GISNDGSTDYIDSVKG |
| 1181 | 4A04 | GISARGSTDYIDSVKG |
| 1182 | 4A05 | GISADGSTDYIDSVKG |
| 1183 | 4A06 | GISRDGSTDYIDSVKG |
| 1184 | 4A07 | GISADGSTLYIDSVKG |
| 1185 | 4A08 | GISADGSTNYIDSVKG |
| 1186 | 4A010 | GISADGSTVYIDSVKG |
| 1187 | 4A011 | GISADGSTTYIDSVKG |
| 1188 | 4A09 | GISADGSTDYIGSVKG |
| 1189 | 4B01 | GISRDGSTDYIDSVKG |
| 1190 | 4B02 | GISADGSTTYIDSVKG |
| 1191 | 4B04 | GVSSDGSTDYIDSVKG |
| 1192 | 4B05 | GISADGHTDYIDSVKG |
| 1193 | 4B06 | GISADGSTDYFDSVKG |
| 1194 | 4B07 | GISADGSTVYIDSVKG |
| 1195 | 4B08 | GISADGSTDYIASVKG |
| 1196 | 4B09 | GISADGSTDYISSVKG |
| 1197 | 4B011 | GISADGSTVYIDSVKG |
| 1198 | 4C01 | GISADGSTVYIDSVKG |
| 1199 | 4C02 | GISADGSTTYIDSVKG |
| 1200 | 4C03 | GISVDGSTDYIDSVKG |
| 1201 | 4C05 | GISADGSTAYIDSVKG |
| 1202 | 4C06 | GISADGSTAYIDSVKG |
| 1203 | 4C07 | GISADGSKDYIDSVKG |
| 1204 | 4C08 | GISADGSTDYFDSVKG |
| 1205 | 4C010 | GISADGSTDYIDSVKG |
| 1206 | 4C011 | GISADGSTVYIDSVKG |
| 1207 | 4D01 | GISADGSTVYIDSVKG |
| 1208 | 4D02 | GISARGSTDYIDSVKG |
| 1209 | 4D03 | GISATGSTDYIDSVKG |
| 1210 | 4D04 | GISKDGSTDYIDSVKG |
| 1211 | 4D05 | GISADGSTVYIDSVKG |
| 1212 | 4D06 | GISPDGSTDYIDSVKG |
| 1213 | 4D08 | GISADGSTHYIDSVKG |
| 1214 | 4D09 | GISADGSTDYILSVKG |
| 1215 | 4D010 | GISADGSTDYIHSVKG |
| 1216 | 4D011 | GISVDGSTDYIDSVKG |
| 1217 | 4E01 | GISRDGSTDYIDSVKG |
| 1218 | 4E02 | GISADGSTVYIDSVKG |
| 1219 | 4E06 | GISADGSTDYIRSVKG |
| 1220 | 4E07 | GISADGSTMYIDSVKG |
| 1221 | 4E08 | GISTDGSTDYIDSVKG |
| 1222 | 4E09 | GISADGSTLYIDSVKG |
| 1223 | 4E010 | GISADGSTDYIDSVKG |
| 1224 | 4E011 | GISATGSTDYIDSVKG |
| 1225 | 4F02 | GISHDGSTDYIDSVKG |
| 1226 | 4F03 | GISYDGSTDYIDSVKG |
| 1227 | 4F04 | GISTDGSTDYIDSVKG |
| 1228 | 4F08 | GISADGSTAYIDSVKG |
| 1229 | 4F09 | GISADGSTDYIESVKG |
| 1230 | 4F010 | GISIDGSTDYIKSVKG |
| 1231 | 4F011 | GISADGSKDYIDSVKG |
| 1232 | 4G01 | GISADGSTVYIDSVKG |
| 1233 | 4G02 | GISRDGSTDYIDSVKG |
| 1234 | 4G03 | GISADGSTDYIHSVKG |
| 1235 | 4G05 | GISADGSTIYIDSVKG |
| 1236 | 4G07 | GISANGSTDYIDSVKG |
| 1237 | 4G08 | GISTDGSTDYIDSVKG |
| 1238 | 4G09 | GISYDGSTDYIDSVKG |
| 1239 | 4G010 | GISADGSTDYIASVKG |
| 1240 | 4G011 | GISADGSTDYIGSVKG |
| 1241 | 4H01 | GISANGSTDYYDSVKG |
| 1242 | 4H03 | GISADGSTSYIDSVKG |
| 1243 | 4H04 | GVSADGSTDYIDSVKG |
| 1244 | 4H05 | GISARGSTDYIDSVKG |
| 1245 | 4H06 | GISADGSTIYIDSVKG |
| 1246 | 4H07 | GISANGSTDYIDSVKG |
| 1247 | 4H08 | GISADGSTDYVDSVKG |
| 1248 | 4H09 | GISADGSTDYRDSVKG |
| 1249 | 4H011 | GISVDGSTDYIDSVKG |
| 1250 | 4D09- | GISADGSTDYILSVKG |
| | M34L | |
| 1251 | 4H11- | GISVDGSTDYIDSVKG |
| | M34L | |
| 1252 | 41B11 | GISSDGSKVFNESVKG |
| 1253 | 41C02 | GISSDGSEVYTDSVKG |
| 1254 | 41D01 | GISSDDSNVYYESVKG |
| 1255 | 41D02 | GISSDGSKVYADSVKG |
| 1256 | 41D03 | GISSDESTLYVDSVKG |
| 1257 | 41D07 | GISSDDSKVYSDSVKG |
| 1258 | 41E01 | GISSDGSQVYGASVKG |
| 1259 | 41E02 | GISSDGSKVYADSVKG |
| 1260 | 41F07 | GISSDGSNMYADSVKG |
| 1261 | 41G01 | GISSDGSKVYTDSVKG |
| 1262 | 42A03 | GISSDGSKVSAESVKG |
| 1263 | 42A06 | GISSDGSKVYDDSVKG |
| 1264 | 42A07 | GISSDGSKVYDDSVKG |
| 1265 | 42A08 | GISSDGSAVYVGSVKG |
| 1266 | 42A11 | GISSDGSYVYSESVKG |
| 1267 | 42B06 | GISSDSSHVYADSVKG |
| 1268 | 42B10 | GISSDSSIVYTDSVKG |
| 1269 | 42C01 | GISSDGSEVNTDSVKG |
| 1270 | 42C03 | GISSDGSKLSSDSVKG |
| 1271 | 42C07 | GISSDNSKVYADSVKG |
| 1272 | 42C08 | GISSDGSRVYFDSVKG |
| 1273 | 42C10 | GISSDGSLVYAESVKG |
| 1274 | 42C11 | GISSDGSVVYVDSVKG |
| 1275 | 42D05 | GISSDGSKVYVDSVKG |
| 1276 | 42D06 | GISSDGSKLYDESVKG |
| 1277 | 42D07 | GISSDYSKLYADSVKG |
| 1278 | 42D08 | GISSDSSKVYTESVKG |
| 1279 | 42E01 | GISSDGSQVYVDSVKG |
| 1280 | 42E02 | GISSDGSKVYSDSVKG |
| 1281 | 42E05 | GISSDGSKVYVDSVKG |
| 1282 | 42E06 | GISSDGSKVYADSVKG |
| 1283 | 42E07 | GISSDGSSVYADSVKG |
| 1284 | 42F01 | GISSDGSQVYYGSVKG |
| 1285 | 42F08 | GISSDGSKVYTDSVKG |
| 1286 | 42F10 | GISSDGSKVSADSVKG |
| 1287 | 42G05 | GISSDGSKVYEDSVKG |
| 1288 | 42G07 | GISSDRSKVYADSVKG |
| 1289 | 42H05 | GISSDGSKVYAESVKG |
| 1290 | 42H08 | GISSDGSVVTTESVKG |
| 1291 | 42H11 | GISSDGSHVHQESVKG |
| 1292 | 51A01 | GISADGSTVYVESVKG |
| 1293 | 51A02 | GISSDGSTVYIDSVKG |
| 1294 | 51A03 | GISVDGSTHYVASVKG |
| 1295 | 51A05 | GISTDGSKHYIDSVKG |
| 1296 | 51B01 | GISYDGSKYYAESVKG |
| 1297 | 51B04 | GISANGSRTYMESVKG |
| 1298 | 51B11 | GISPDGSTDYVDSVKG |
| 1299 | 51C02 | GISPNGSAVYTESVKG |
| 1300 | 51D01 | GISPDGSTAYMESVKG |
| 1301 | 51D03 | GISNDGSTDYIDSVKG |
| 1302 | 51E02 | GISTDGSAVYFDSVKG |
| 1303 | 51E03 | GISTGGSTHYIESVKG |
| 1304 | 51E05 | GISTDGSTVYIDSVKG |
| 1305 | 51F01 | GISNEGSTYYMDSVKG |
| 1306 | 51F02 | GISADGSHVYTNSVKG |
| 1307 | 51F03 | GISDDGSRYYTDSVKG |
| 1308 | 51F04 | GISAEGSTLYMESVKG |
| 1309 | 51G02 | GISTDGSTVYIDSVKG |
| 1310 | 51G04 | GISANGSTSYIDSVKG |
| 1311 | 51G10 | GISDDGSRHYIESVKG |
| 1312 | 51H04 | GISPDGSTVYIESVKG |
| 1313 | 51H05 | GISDDGSTVYVDSVKG |
| 1314 | 52B01 | GISDDGSTVYFDSVKG |
| 1315 | 52C04 | GISDEGSTVYIGSVKG |
| 1316 | 52D04 | GISDDGSIVYMDSVKG |
| 1317 | 53A04 | GISDDGSKHYFDSVKG |
| 1318 | 53A05 | GISTDGSTDYLHSVKG |
| 1319 | 53A09 | GISDDGSKHYFDSVKG |
| 1320 | 53B05 | GISYDGSTVYVESVKG |
| 1321 | 53B06 | GISDDGSTVYIDSVKG |
| 1322 | 53C03 | GISDDGSTVYVDSVKG |
| 1323 | 53C04 | GISDDGSQVYIDSVKG |
| 1324 | 53H03 | GISVDGSTVYSDSVKG |
| 1325 | 53H04 | GISDDGSNVYIDSVKG |
| 1326 | 54B05 | GISTDGSTVYFVSVKG |
| SEQ. | | |
| ID NO. | name | CDR3 |
| 1327 | DL1 | RYFERTD |
| 1328 | DL74 | RYFERTD |
| 1329 | DL31 | RYFERTD |
| 1330 | DL3 | YQGLYAY |
| 1331 | DL80 | RVFDHVY |
| 1332 | DL18 | RAFGRDY |
| 1333 | DL94 | RTMGRDY |
| 1334 | DL17 | WDGVGGAY |
| 1335 | DL46 | WDGVGGAY |
| 1336 | DL15 | WNGVGGAY |
| 1337 | DL26 | WDGVGGAY |
| 1338 | DL83 | WDGVGGAY |
| 1339 | DL5 | RSWNNY |
| 1340 | DL22 | RSWNNY |
| 1341 | DL85 | RSWNNY |
| 1342 | DL69 | ESFGRIWYN |
| 1343 | DL27 | QHFGTDS |
| 1344 | DL51 | QQFGTDS |
| 1345 | DL54 | YGIQRAEGY |
| 1346 | DL11 | YRWVGRDTY |
| 1347 | DL19 | YRWVGRDTY |
| 1348 | DL68 | YRWVGRDTY |
| 1349 | DL14 | YRWEGRDTY |
| 1350 | DL67 | YRWEGRNTY |
| 1351 | DL56 | YRWVGRYTY |
| 1352 | DL13 | YRWVGRDTY |
| 1353 | DL77 | YRWVGRDTY |
| 1354 | DL79 | YRWVGRDTY |
| 1355 | DL20 | YRWVDRYTY |
| 1356 | DL41 | YRWIDRYTY |
| 1357 | DL59 | YRWVDRYTY |
| 1358 | DL16 | YRWVGRDTY |
| 1359 | DL6 | YRWTTRYTY |
| 1360 | DL84 | YRWVGGYTY |
| 1361 | DL2 | FRTVAASSMQY |
| 1362 | DL43 | FRTVSGSSMRY |
| 1363 | DL92 | NRGFAGAPSY |
| 1364 | DL10 | YFQSSY |
| 1365 | DL82 | YFQSSY |
| 1366 | DL23 | YFQSSY |
| 1367 | DL42 | HWTQGSVPKES |
| 1368 | DL45 | RSYSSDY |
| 1369 | DL58 | RYGDINY |
| 1370 | DL70 | RYGDINY |
| 1371 | DL89 | YDSRSY |
| 1372 | DL38 | YDNINAY |
| 1373 | DL52 | YDNINAY |
| 1374 | DL64 | YDNINAY |
| 1375 | DL33 | YDNINAY |
| 1376 | DL12 | WIAGKAY |
| 1377 | DL29 | RSQLGST |
| 1378 | DL61 | YYLDTYAY |
| 1379 | DH1 | RYFERTD |
| 1380 | DH10 | YFQSSY |
| 1381 | DH11 | YRWVGRDTY |
| 1382 | DH12 | WIAGKAY |
| 1383 | DH15 | WNGVGGAY |
| 1384 | DH17 | WDGVGGAY |
| 1385 | DH18 | RAFGRDY |
| 1386 | DH2 | FRTVAASSMQY |
| 1387 | DH22 | RSWNNY |
| 1388 | DH23 | YFQSSY |
| 1389 | DH27 | QHFGTDS |
| 1390 | DH29 | RSQLGST |
| 1391 | DH3 | YQGLYAY |
| 1392 | DH38 | YDNINAY |
| 1393 | DH42 | HWTQGSVPKES |
| 1394 | DH43 | FRTVSGSSMRY |
| 1395 | DH45 | RSYSSDY |
| 1396 | DH5 | RSWNNY |
| 1397 | DH51 | QQFGTDS |
| 1398 | DH54 | YGIQRAEGY |
| 1399 | DH56 | YRWVGRYTY |
| 1400 | DH58 | RYGDINY |
| 1401 | DH6 | YRWTTRYTY |
| 1402 | DH61 | YYLDTYAY |
| 1403 | DH67 | YRWEGRNTY |
| 1404 | DH69 | ESFGRIWYN |
| 1405 | DH70 | RYGDINY |
| 1406 | DH80 | RVFDHVY |
| 1407 | DH82 | YFQSSY |
| 1408 | DH83 | WDGVGGAY |
| 1409 | DH84 | YRWVGGYTY |
| 1410 | DH89 | YDSRSY |
| 1411 | DH92 | NRGFAGAPSY |
| 1412 | DH94 | RTMGRDY |
| 1413 | 1A01 | FRHVSGSSMRY |
| 1414 | 1A03 | FRTVSGSSSRY |
| 1415 | 1A04 | FRTVSGSSMRY |
| 1416 | 1A05 | FRTVRGSSMSY |
| 1417 | 1A06 | FRTVSGSSKRY |
| 1418 | 1A07 | FRMVSGSSMRY |
| 1419 | 1A09 | FRTVQGSSMRY |
| 1420 | 1A010 | FRTVYGSSMRY |
| 1421 | 1A011 | FRTVSGSSYRY |
| 1422 | 1A012 | FRTVLGSSMRY |
| 1423 | 1B01 | FRRVSGSSMRY |
| 1424 | 1B02 | FRTVSGSSMRY |
| 1425 | 1B03 | FRTVSGSSARY |
| 1426 | 1B04 | FRIVRGSSMRY |
| 1427 | 1B05 | YRTVSGSSMRY |
| 1428 | 1B07 | FRHVSGSSMRY |
| 1429 | 1B08 | FRFVSGSSMRY |
| 1430 | 1B09 | FRTVSGSSMRY |
| 1431 | 1B010 | FRTKSGSSMRY |
| 1432 | 1B011 | FRTVYGSSMRY |
| 1433 | 1C01 | FRTVSGSSMGY |
| 1434 | 1C02 | FRTVSGSSMRS |
| 1435 | 1C03 | FRTVGGSSMRY |
| 1436 | 1C04 | FRTVSGSSMRY |
| 1437 | 1C05 | FRTVSGSHMRY |
| 1438 | 1C06 | FRAVSGSSMRY |
| 1439 | 1C07 | FRTVSGSSMRY |
| 1440 | 1C08 | FRTVSGSPMRY |
| 1441 | 1C010 | FRTVSGSSMSY |
| 1442 | 1C011 | FRTVSGSSMRY |
| 1443 | 1C012 | FRTVRGSSMRY |
| 1444 | 1D01 | FRTVRGSSMRY |
| 1445 | 1D02 | FRQVSGSSMRY |
| 1446 | 1D03 | FRIVSGSSMGY |
| 1447 | 1D04 | FRTVSGASMRY |
| 1448 | 1D06 | FRTVHGSSMRY |
| 1449 | 1D08 | FRMVSGSSMRY |
| 1450 | 1D09 | FRTISGSSMRY |
| 1451 | 1D010 | FRTRSGSSMRY |
| 1452 | 1D011 | FRTVSGHSMRY |
| 1453 | 1D012 | FRTVSGGSMRY |
| 1454 | 1E02 | FRTKSGSSMRY |
| 1455 | 1E04 | FRTASGTSMRY |
| 1456 | 1E05 | FNTVSGSSMRY |
| 1457 | 1E07 | FRTVRGSSQRY |
| 1458 | 1E08 | FRTVLGSSMRY |
| 1459 | 1E09 | FRTRSGSSMRY |
| 1460 | 1E010 | FRTVSGLSMRY |
| 1461 | 1E011 | FRTVRGSSQRY |
| 1462 | 1E012 | FRTVSGSSMVY |
| 1463 | 1F01 | FRTVSRSSMRY |
| 1464 | 1F02 | FRTVSGSSMSY |
| 1465 | 1F04 | FRTVSGSSARY |
| 1466 | 1F05 | FHTVSGSSMRY |
| 1467 | 1F06 | FRTVLGSSMRY |
| 1468 | 1F07 | FRTVSGSSMRY |
| 1469 | 1F08 | FRNVSGSSMRY |
| 1470 | 1F09 | FRTVTGSSMRY |
| 1471 | 1F010 | FRTVSGSSMRY |
| 1472 | 1F011 | FRTVKGSSMRY |
| 1473 | 1F012 | FRTNSGSSMRY |
| 1474 | 1G01 | FRTVSGASMRY |
| 1475 | 1G04 | FRTVNLSSMRY |
| 1476 | 1G05 | FRTVTGSSMRY |
| 1477 | 1G06 | FRKVSGSSARY |
| 1478 | 1G07 | FRTYSGSSMRY |
| 1479 | 1G09 | FRTVSKSSMRY |
| 1480 | 1G011 | FKTVSGSSMRY |
| 1481 | 1H01 | FRTRSGSSMRY |
| 1482 | 1H02 | FRTSSGSSMRY |
| 1483 | 1H06 | FRFLSGSSMRY |
| 1484 | 1H07 | FRTVSGSSMRY |
| 1485 | 1H08 | FRLVSGSSMRY |
| 1486 | 1H010 | FRTVSGSSMRF |
| 1487 | 1H011 | FRTQSGSSMRY |
| 1488 | 1H012 | FRTVSGSSMPY |
| 1489 | 2A01 | FRTLSGSSMRY |
| 1490 | 2A03 | FRTVSGSAMRY |
| 1491 | 2A04 | FRTTSGSSMRY |
| 1492 | 2A05 | FRTVSGTSMRY |
| 1493 | 2A06 | FRTRSGSSMRY |
| 1494 | 2A08 | FRTSSGSSMRY |
| 1495 | 2A09 | FRTVSGSSMSY |
| 1496 | 2A011 | FRPVSGSSMRY |
| 1497 | 2B01 | FRHVSGSSMRY |
| 1498 | 2B02 | FRTKSGSSMRY |
| 1499 | 2B03 | FTTVSGSSMRY |
| 1500 | 2B05 | FHTVSGSSMRY |
| 1501 | 2B07 | FRTVRGSSMRY |
| 1502 | 2B010 | FRTVLGSSMRY |
| 1503 | 2B011 | FRTVSGSSMRS |
| 1504 | 2B012 | FRTVRGSSMRY |
| 1505 | 2C01 | FRYVSGSSMRY |
| 1506 | 2C02 | FRTVYGSSMRY |
| 1507 | 2C04 | FRTVLGSSMRY |
| 1508 | 2C06 | YRTVSGSSMRY |
| 1509 | 2C07 | FRSVSGSSMRY |
| 1510 | 2C08 | FRRVSGSSMRY |
| 1511 | 2C09 | FRTVSGTSMRY |
| 1512 | 2C010 | FRTVAGSSMRY |
| 1513 | 2D02 | FRIVSGSSMRY |
| 1514 | 2D03 | FRTVSGVSMRY |
| 1515 | 2D04 | FRTVQGSSMRY |
| 1516 | 2D05 | FRTASGSSMRY |
| 1517 | 2D06 | FRTVSGSSSRY |
| 1518 | 2D07 | FRTVQGSSMRY |
| 1519 | 2D09 | FRTVRGSSMRY |
| 1520 | 2D010 | FRTKSGSSMRY |
| 1521 | 2D011 | FRTVWGSSMRY |
| 1522 | 2D012 | FRTRSGSSMRY |
| 1523 | 2E01 | FHTVCGTSMGY |
| 1524 | 2E02 | FRTVSGSSQRY |
| 1525 | 2E05 | FRTVSGSSMSY |
| 1526 | 2E06 | FRTVRGSSMRY |
| 1527 | 2E08 | FRTQSGSSMRY |
| 1528 | 2E09 | FRTLSGSSMRY |
| 1529 | 2E010 | FHTVSGSSMRY |
| 1530 | 2E011 | FRRVSGSSMRY |
| 1531 | 2F01 | FRLVSGSSMRY |
| 1532 | 2F02 | FRTVSGSYMRY |
| 1533 | 2F03 | FRTVGGSSMRY |
| 1534 | 2F06 | FRTHSGSSMRY |
| 1535 | 2F07 | FRTVSTSSMRY |
| 1536 | 2F08 | FRTVLGTSMRY |
| 1537 | 2F09 | FRTVSGSSMRY |
| 1538 | 2F11 | FRTVSGSSMGY |
| 1539 | 2G03 | FRTVSGSSMRA |
| 1540 | 2G04 | FRILSGSSMRY |
| 1541 | 2G07 | FRTVQGSSMRY |
| 1542 | 2G08 | FRTVSGQSMGY |
| 1543 | 2G09 | FRTVSGSSARY |
| 1544 | 2G011 | FRYVSGSSMRY |
| 1545 | 2H010 | FRTVSGSSMRY |
| 1546 | 2H011 | FRRVSGSSMRY |
| 1547 | 2H02 | FHTVSGSSMRY |
| 1548 | 2H03 | FRQVSGSSMRY |
| 1549 | 2H04 | FRTVSGSYMRY |
| 1550 | 2H06 | FRTASGSSMRY |
| 1551 | 2H07 | FRTVSGHSMRY |
| 1552 | 2H08 | FRTVSGSSSRY |
| 1553 | 2E05-M106Y | FRTVSGSSYSY |
| 1554 | 2E05-M106Q | FRTVSGSSQSY |
| 1555 | 3A01 | YRWTRRYTY |
| 1556 | 3A02 | YRWRTRYTY |
| 1557 | 3A03 | YRWTTRRTY |
| 1558 | 3A04 | YRWTTRYIY |
| 1559 | 3A05 | YRWRTRYTY |
| 1560 | 3A06 | YRWTRRYTY |
| 1561 | 3A08 | YRWRTRYTY |
| 1562 | 3A09 | YRWTTRYIY |
| 1563 | 3A010 | YRWTTRRTY |
| 1564 | 3A011 | YRWRTRYTY |
| 1565 | 3B01 | YRWTTRYTY |
| 1566 | 3B02 | YRWRTRYTY |
| 1567 | 3B04 | YHWTTRYTY |
| 1568 | 3B05 | YRWTTRRTY |
| 1569 | 3B06 | YRWTTRYTY |
| 1570 | 3B07 | YRWTTRYTY |
| 1571 | 3B09 | YRWTTRYAY |
| 1572 | 3B010 | YRWVTRYTY |
| 1573 | 3B011 | YRWVTRYTY |
| 1574 | 3C01 | YRWSTRYTY |
| 1575 | 3C02 | YRWRTRYTY |
| 1576 | 3C03 | YRWTTRGTY |
| 1577 | 3C04 | YRWDTRYTY |
| 1578 | 3C05 | YRWTTRRTY |
| 1579 | 3C06 | YRWRTRYTY |
| 1580 | 3C08 | YRWTGRYTY |
| 1581 | 3C09 | YRWRTRYTY |
| 1582 | 3C011 | YRWRTRYTY |
| 1583 | 3D01 | YRWITRYTY |
| 1584 | 3D02 | YRWITRYTY |
| 1585 | 3D03 | YRWRTRYTY |
| 1586 | 3D05 | YRWTRRYTY |
| 1587 | 3D07 | YSWTTRYTY |
| 1588 | 3D08 | YRWTNRYTY |
| 1589 | 3D09 | YRWTTRYRY |
| 1590 | 3D010 | YRWTTRYTY |
| 1591 | 3D011 | YRWTTRYKY |
| 1592 | 3E01 | YRWHTRYTY |
| 1593 | 3E02 | YRWTRRYTY |
| 1594 | 3E03 | YRWMTRYTY |
| 1595 | 3E04 | YRWTTRYRY |
| 1596 | 3E09 | YRWSTRYTY |
| 1597 | 3E011 | YRWTTRYTF |
| 1598 | 3F03 | YRWRTRYTY |
| 1599 | 3F05 | YRWTTRRTY |
| 1600 | 3F06 | YRWATRYTY |
| 1601 | 3F08 | YRWHTRYTY |
| 1602 | 3F09 | YRWGTRYTY |
| 1603 | 3F010 | YRWTTRNTY |
| 1604 | 3F011 | YRWRTRYTY |
| 1605 | 3G01 | YRWTTRYAY |
| 1606 | 3G02 | YRWRTRYTY |
| 1607 | 3G04 | YRWTTRRTY |
| 1608 | 3G06 | YRWTTRRTY |
| 1609 | 3G07 | YRWTSRYTY |
| 1610 | 3G08 | YRWTTRVTY |
| 1611 | 3G09 | YRWTTRTTY |
| 1612 | 3G010 | YRWRTRYTY |
| 1613 | 3G011 | YRWATRYTY |
| 1614 | 3H01 | YRWTTRRTY |
| 1615 | 3H03 | LRWTTRYTY |
| 1616 | 3H06 | YRWTTRGTY |
| 1617 | 3H07 | YRWRTRYTY |
| 1618 | 3H09 | YRWTTRATY |
| 1619 | 3H010 | YRWTTRRTY |
| 1620 | 3H011 | YRWPTRYTY |
| 1621 | 4A01 | YRWRTRYTY |
| 1622 | 4A02 | YRWKTRYTY |
| 1623 | 4A04 | YRWSTRYTY |
| 1624 | 4A05 | YRWKTRRTY |
| 1625 | 4A06 | YRWTTRRTY |
| 1626 | 4A07 | YRWTTRYRY |
| 1627 | 4A08 | YRWRTRYTY |
| 1628 | 4A010 | YRWTTRYKY |
| 1629 | 4A011 | YRWKTRYTY |
| 1630 | 4A09 | YRWTTRVTY |
| 1631 | 4B01 | YRWTTRFTY |
| 1632 | 4B02 | YRWTTRFTY |
| 1633 | 4B04 | YRWRTRYTY |
| 1634 | 4B05 | YRWTTRYTH |
| 1635 | 4B06 | YRWTRRYTY |
| 1636 | 4B07 | YRWTTRYTY |
| 1637 | 4B08 | YRWTTRSTY |
| 1638 | 4B09 | YSWTTRYTY |
| 1639 | 4B011 | YRWTTRGTY |
| 1640 | 4C01 | YRWKTRYTY |
| 1641 | 4C02 | YRWTTRFTY |
| 1642 | 4C03 | YRWRTRYTY |
| 1643 | 4C05 | YRWTTRRTY |
| 1644 | 4C06 | YRWSTRYTY |
| 1645 | 4C07 | YRWTTRLTY |
| 1646 | 4C08 | YRWTRRYTY |
| 1647 | 4C010 | YRWTTRLTY |
| 1648 | 4C011 | YRWTRRYTY |
| 1649 | 4D01 | YRWTTRRTY |
| 1650 | 4D02 | YQWTTRYTY |
| 1651 | 4D03 | YRWTRRYTY |
| 1652 | 4D04 | YRWTTRMTY |
| 1653 | 4D05 | YRWTTRRTY |
| 1654 | 4D06 | YRWTTRYRY |
| 1655 | 4D08 | YRWLTRYTY |
| 1656 | 4D09 | YEWTTRYTY |
| 1657 | 4D010 | YRWRTRYTY |
| 1658 | 4D011 | YRWRTRYTY |
| 1659 | 4E01 | YRWRTRYTY |
| 1660 | 4E02 | YRWSTRYTY |
| 1661 | 4E06 | YRWTTRLTY |
| 1662 | 4E07 | YRWTTRLTY |
| 1663 | 4E08 | YKWTTRYTY |
| 1664 | 4E09 | YRWTTRSTY |
| 1665 | 4E010 | YRWRTRYTY |
| 1666 | 4E011 | YRWSTRYTY |
| 1667 | 4F02 | YRWTTRYTY |
| 1668 | 4F03 | YRWRTRYTY |
| 1669 | 4F04 | YRWLTRYTY |
| 1670 | 4F08 | YRWRTRYTY |
| 1671 | 4F09 | YRWTTRYTY |
| 1672 | 4F010 | YRWTTRYRY |
| 1673 | 4F011 | YRWTTRYTY |
| 1674 | 4G01 | YRWPTRYTY |
| 1675 | 4G02 | YRWTTRHTY |
| 1676 | 4G03 | YRWTRRYTY |
| 1677 | 4G05 | YRWHTRYTY |
| 1678 | 4G07 | YRWTNRYTY |
| 1679 | 4G08 | YRWTTRYRY |
| 1680 | 4G09 | YRWTTRRTY |
| 1681 | 4G010 | YRWSTRYTY |
| 1682 | 4G011 | YRWSTRYTY |
| 1683 | 4H01 | YRWRTRYTY |
| 1684 | 4H03 | YRWTTRYTY |
| 1685 | 4H04 | YEWTTRYTY |
| 1686 | 4H05 | YRWTTRSTY |
| 1687 | 4H06 | YRWTTRYTY |
| 1688 | 4H07 | YRWSTRYTY |
| 1689 | 4H08 | YRWSTRYTY |
| 1690 | 4H09 | YRWTYRYTY |
| 1691 | 4H011 | YRWTTRLTY |
| 1692 | 4D09-M34L | YEWTTRYTY |
| 1693 | 4H11-M34L | YRWTTRLTY |
| 1694 | 41B11 | FRPAAGSPMRY |
| 1695 | 41C02 | FRTVDGSPLRY |
| 1696 | 41D01 | FRTVSGSSKRY |
| 1697 | 41D02 | FSAGSGTEMSY |
| 1698 | 41D03 | FGSLSGSSTTY |
| 1699 | 41D07 | FGSVSGSWTRY |
| 1700 | 41E01 | FRLVSGSSMSY |
| 1701 | 41E02 | FRTGSGTSKSY |
| 1702 | 41F07 | FSNMSGTTRRY |
| 1703 | 41G01 | FRTVPGSAMGY |
| 1704 | 42A03 | FRAESGSSMGY |
| 1705 | 42A06 | FRTLYGSSRSY |
| 1706 | 42A07 | FSPFSGSDTGY |
| 1707 | 42A08 | FSTFSGSSISY |
| 1708 | 42A11 | FRTLAGSEMRY |
| 1709 | 42B06 | FRTVSGSGVRY |
| 1710 | 42B10 | FRPGAGHSNSY |
| 1711 | 42C01 | FRRASGTAMSY |
| 1712 | 42C03 | FTSASGTDLSY |
| 1713 | 42C07 | FRSANGSSKRY |
| 1714 | 42C08 | FKTIAGAGMRY |
| 1715 | 42C10 | FRYGSGSSLSY |
| 1716 | 42C11 | FRTVPGASMKY |
| 1717 | 42D05 | FRTVDGSAISY |
| 1718 | 42D06 | FRTVKGSGGSY |
| 1719 | 42D07 | FRTVSGSSRGY |
| 1720 | 42D08 | FRPGPGSQMAY |
| 1721 | 42E01 | FRTVAGSASGY |
| 1722 | 42E02 | FRTVSGSSYSY |
| 1723 | 42E05 | FINLKGSSMAY |
| 1724 | 42E06 | FRMVTGSYGGY |
| 1725 | 42E07 | FKSSYGLPMRY |
| 1726 | 42F01 | FKTVSGQSLRY |
| 1727 | 42F08 | FRTVTGRAARY |
| 1728 | 42F10 | FGPAIGASRTY |
| 1729 | 42G05 | FRTVSGAPKSY |
| 1730 | 42G07 | FHTVSGSSMSY |
| 1731 | 42H05 | FRRLEGYSNRY |
| 1732 | 42H08 | FRTGSGSSMGY |
| 1733 | 42H11 | FTTVTGSSMSY |
| 1734 | 51A01 | YYWTERRPY |
| 1735 | 51A02 | YSWDDAHPY |
| 1736 | 51A03 | YRWMTRLTY |
| 1737 | 51A05 | YDWADAQPY |
| 1738 | 51B01 | YSWTDRLPY |
| 1739 | 51B04 | YRWATRLPY |
| 1740 | 51B11 | YKWSNRLPY |
| 1741 | 51C02 | YGWKTRQPY |
| 1742 | 51D01 | YRWPNRRGY |
| 1743 | 51D03 | YDWTTRQRY |
| 1744 | 51E02 | YNWSYAQPY |
| 1745 | 51E03 | YNWTDSLQY |
| 1746 | 51E05 | YSWTTSLPY |
| 1747 | 51F01 | YKWRSRSTY |
| 1748 | 51F02 | YSQTTRDPY |
| 1749 | 51F03 | YRWTARDTY |
| 1750 | 51F04 | YRWTSRLSY |
| 1751 | 51G02 | YSWTTRSRY |
| 1752 | 51G04 | YNWTSRYRY |
| 1753 | 51G10 | YSWKTRFPY |
| 1754 | 51H04 | YSWTTRYPY |
| 1755 | 51H05 | YEWTNALPY |
| 1756 | 52B01 | YSWITRSPY |
| 1757 | 52C04 | YSWTTRRQY |
| 1758 | 52D04 | YSWITRSPY |
| 1759 | 53A04 | YRWEESRQY |
| 1760 | 53A05 | YTWTTRLPY |
| 1761 | 53A09 | YRWEESRQY |
| 1762 | 53B05 | YSWTTRQPY |
| 1763 | 53B06 | YVWGTRLPY |
| 1764 | 53C03 | YEWTNALPY |
| 1765 | 53C04 | YRWEDALTY |
| 1766 | 53H03 | YSWTTRYPY |
| 1767 | 53H04 | YSWIDSLRY |
| 1768 | 54B05 | YSWTTPRAY |
| SEQ | | |
| ID NO: | Description | AA Sequence |
| 1769 | Anti-HSA sdAb clone | EVQLVESGGGLVQPGNSLRLSCAASGFTFSRFGMSWVRQAPGKGLEWVSS |
| | 6C | ISGSGSDTLYADSVKGRFTISRDNAKTTLYLQMNSLRPEDTAVYYCTIGG |
| | | SLSRSSQGTLVTVSS |
| 1770 | Anti-HSA sdAb clone | EVQLVESGGGLVQPGNSLRLSCAASGFTFSKFGMSWVRQAPGKGLEWVSS |
| | 7A | ISGSGADTLYADSLKGRFTISRDNAKTTLYLQMNSLRPEDTAVYYCTIGG |
| | | SLSKSSQGTLVTVSS |
| 1771 | Anti-HSA sdAb clone | EVQLVESGGGLVQPGNSLRLSCAASGFTYSSFGMSWVRQAPGKGLEWVSS |
| | 7G | ISGSGSDTLYADSVKGRFTISRDNAKTTLYLQMNSLRPEDTAVYYCTIGG |
| | | SLSKSSQGTLVTVSS |
| 1772 | Anti-HSA sdAb clone | EVQLVESGGGLVQPGNSLRLSCAASGFTFSKFGMSWVRQAPGKGLEWVSS |
| | 8H | ISGSGTDTLYADSVKGRFTISRDNAKTTLYLQMNSLRPEDTAVYYCTIGG |
| | | SLSRSSQGTLVTVSS |
| 1773 | Anti-HSA sdAb clone | EVQLVESGGGLVQPGNSLRLSCAASGFTFSRFGMSWVRQAPGKGLEWVSS |
| | 9A | ISGSGSDTLYADSVKGRFTISRDNAKTTLYLQMNSLRPEDTAVYYCTIGG |
| | | SLSKSSQGTLVTVSS |
| 1774 | Anti-HSA sdAb clone | EVQLVESGGGLVQPGNSLRLSCAASGFTFSKFGMSWVRQAPGKGLEWVSS |
| | 10G | ISGSGRDTLYADSVKGRFTISRDNAKTTLYLQMNSLRPEDTAVYYCTIGG |
| | | SLSVSSQGTLVTVSS |
| 1775 | wt anti-HSA | EVQLVESGGGLVQPGNSLRLSCAASGFTFSSFGMSWVRQAPGKGLEWVSS |
| | | ISGSGSDTLYADSVKGRFTISRDNAKTTLYLQMNSLRPEDTAVYYCTIGG |
| | | SLSRSSQGTLVTVSS |
| 1776 | Anti-HSA sdAb clone | EVQLVESGGGLVQPGNSLRLSCAASGFTFSRFGMSWVRQAPGKGLEWVSS |
| | 6CE | ISGSGSDTLYAESVKGRFTISRDNAKTTLYLQMNSLRPEDTAVYYCTIGG |
| | | SLSRSSQGTLVTVSS |
| 1777 | Anti-HSA sdAb clone | EVQLVESGGGLVQPGNSLRLSCAASGFTFSKFGMSWVRQAPGKGLEWVSS |
| | 8HE | ISGSGTDTLYAESVKGRFTISRDNAKTTLYLQMNSLRPEDTAVYYCTIGG |
| | | SLSRSSQGTLVTVSS |
| 1778 | Anti-HSA sdAb clone | EVQLVESGGGLVQPGNSLRLSCAASGFTFSKFGMSWVRQAPGKGLEWVSS |
| | 10GE | ISGSGRDTLYAESVKGRFTISRDNAKTTLYLQMNSLRPEDTAVYYCTIGG |
| | | SLSVSSQGTLVTVSS |
| 1779 | wt anti-HSA CDR1 | GFTFSSFGMS |
| 1780 | wt anti-HSA CDR2 | SISGSGSDTLYADSVK |
| 1781 | wt anti-HSACDR3 | GGSLSR |
| 1782 | CDR1 variant 1 | GFTFSRFGMS |
| 1783 | CDR1 variant 2 | GFTFSKFGMS |
| 1784 | CDR1 variant 3 | GFTYSSFGMS |
| 1785 | CDR2 variant 1 | SISGSGADTLYADSLK |
| 1786 | CDR2 variant 2 | SISGSGTDTLYADSVK |
| 1787 | CDR2 variant 3 | SISGSGRDTLYADSVK |
| 1788 | CDR2 variant 4 | SISGSGSDTLYAESVK |
| 1789 | CDR2 variant 5 | SISGSGTDTLYAESVK |
| 1790 | CDR2 variant 6 | SISGSGRDTLYAESVK |
| 1791 | CDR3 variant 1 | GGSLSK |
| 1792 | CDR3 variant 2 | GGSLSV |
| 1793 | Anti-CD3, | EVQLVESGGGLVQPGGSLKLSCAASGFTFNKYAINWVRQAPGKGLEWVARIRSK |
| | clone 2B2 | YNNYATYYADQVKDRFTISRDDSKNTAYLQMNNLKTEDTAVYYCVRHANFGNSY |
| | | ISYWAYWGQGTLVTVSSGGGGSGGGGSGGGGSQTVVTQEPSLTVSPGGTVTLTC |
| | | ASSTGAVTSGNYPNWVQQKPGQAPRGLIGGTKFLVPGTPARFSGSLLGGKAALT |
| | | LSGVQPEDEAEYYCTLWYSNRWVFGGGTKLTVL |
| 1794 | Anti-CD3, | EVQLVESGGGLVQPGGSLKLSCAASGFEFNKYAMNWVRQAPGKGLEWVARIRSK |
| | clone 9F2 | YNKYATYYADSVKDRFTISRDDSKNTAYLQMNNLKTEDTAVYYCVRHGNFGNSY |
| | | ISYWAYWGQGTLVTVSSGGGGSGGGGSGGGGSQTVVTQEPSLTVSPGGTVTLTC |
| | | GSSFGAVTSGNYPNWVQQKPGQAPRGLIGGTKFLAPGTPARFSGSLLGGKAALT |
| | | LSGVQPEDEAEYYCVLWYDNRWVFGGGTKLTVL |
| 1795 | Anti-CD3, | EVQLVESGGGLVQPGGSLKLSCAASGFTFNKYAMNWVRQAPGKGLEWVARIRSK |
| | clone 5A2 | YNNYATYYADSVKDRFTISRDDSKNTAYLQMNNLKTEDTAVYYCVRHGNFGNSH |
| | | ISYWAYWGQGTLVTVSSGGGGSGGGGSGGGGSQTVVTQEPSLTVSPGGTVTLTC |
| | | GSSTGYVTSGNYPNWVQQKPGQAPRGLIGGTSFLAPGTPARFSGSLLGGKAALT |
| | | LSGVQPEDEAEYYCVLWYSNRWIFGGGTKLTVL |
| 1796 | Anti-CD3, | EVQLVESGGGLVQPGGSLKLSCAASGFMFNKYAMNWVRQAPGKGLEWVARIRSK |
| | clone 6A2 | SNNYATYYADSVKDRFTISRDDSKNTAYLQMNNLKTEDTAVYYCVRHGNFGNSY |
| | | ISYWATWGQGTLVTVSSGGGGSGGGGSGGGGSQTVVTQEPSLTVSPGGTVTLTC |
| | | GSSFGAVTSGNYPNWVQQKPGQAPRGLIGGTKLLAPGTPARFSGSLLGGKAALT |
| | | LSGVQPEDEAEYYCVLWYSNSWVFGGGTKLTVL |
| 1797 | Anti-CD3, | EVQLVESGGGLVQPGGSLKLSCAASGFTFNTYAMNWVRQAPGKGLEWVARIRSK |
| | clone 2D2 | YNNYATYYKDSVKDRFTISRDDSKNTAYLQMNNLKTEDTAVYYCVRHGNFGNSP |
| | | ISYWAYWGQGTLVTVSSGGGGSGGGGSGGGGSQTVVTQEPSLTVSPGGTVTLTC |
| | | GSSTGAVVSGNYPNWVQQKPGQAPRGLIGGTEFLAPGTPARESGSLLGGKAALT |
| | | LSGVQPEDEAEYYCVLWYSNRWVFGGGTKLTVL |
| 1798 | Anti-CD3, | EVQLVESGGGLVQPGGSLKLSCAASGFTYNKYAMNWVRQAPGKGLEWVARIRSK |
| | clone 3F2 | YNNYATYYADEVKDRFTISRDDSKNTAYLQMNNLKTEDTAVYYCVRHGNFGNSP |
| | | ISYWAYWGQGTLVTVSSGGGGSGGGGSGGGGSQTVVTQEPSLTVSPGGTVTLTC |
| | | GSSKGAVTSGNYPNWVQQKPGQAPRGLIGGTKELAPGTPARFSGSLLGGKAALT |
| | | LSGVQPEDEAEYYCTLWYSNRWVFGGGTKLTVL |
| 1799 | Anti-CD3, | EVQLVESGGGLVQPGGSLKLSCAASGNTFNKYAMNWVRQAPGKGLEWVARIRSK |
| | clone 1A2 | YNNYETYYADSVKDRFTISRDDSKNTAYLQMNNLKTEDTAVYYCVRHTNFGNSY |
| | | ISYWAYWGQGTLVTVSSGGGGSGGGGSGGGGSQTVVTQEPSLTVSPGGTVTLTC |
| | | GSSTGAVTSGYYPNWVQQKPGQAPRGLIGGTYFLAPGTPARFSGSLLGGKAALT |
| | | LSGVQPEDEAEYYCVLWYSNRWVFGGGTKLTVL |
| 1800 | Anti-CD3, | EVQLVESGGGLVQPGGSLKLSCAASGFTFNNYAMNWVRQAPGKGLEWVARIRSK |
| | clone 1C2 | YNNYATYYADAVKDRFTISRDDSKNTAYLQMNNLKTEDTAVYYCVRHGNFGNSQ |
| | | ISYWAYWGQGTLVTVSSGGGGSGGGGSGGGGSQTVVTQEPSLTVSPGGTVTLTC |
| | | GSSTGAVTDGNYPNWVQQKPGQAPRGLIGGIKFLAPGTPARFSGSLLGGKAALT |
| | | LSGVQPEDEAEYYCVLWYSNRWVFGGGTKLTVL |
| 1801 | Anti-CD3, | EVQLVESGGGLVQPGGSLKLSCAASGFTFNKYAVNWVRQAPGKGLEWVARIRSK |
| | clone 2E4 | YNNYATYYADSVKDRFTISRDDSKNTAYLQMNNLKTEDTAVYYCVRHGNFGNSY |
| | | ISYWAYWGQGTLVTVSSGGGGSGGGGSGGGGSQTVVTQEPSLTVSPGGTVTLTC |
| | | GESTGAVTSGNYPNWVQQKPGQAPRGLIGGTKILAPGTPARFSGSLLGGKAALT |
| | | LSGVQPEDEAEYYCVLWYSNRWVFGGGTKLTVL |
| 1802 | Anti-CD3, | EVQLVESGGGLVQPGGSLKLSCAASGFTFNKYPMNWVRQAPGKGLEWVARIRSK |
| | clone 10E4 | YNNYATYYADSVKDRFTISRDDSKNTAYLQMNNLKNEDTAVYYCVRHGNFNNSY |
| | | ISYWAYWGQGTLVTVSSGGGGSGGGGSGGGGSQTVVTQEPSLTVSPGGTVTLTC |
| | | GSSTGAVTKGNYPNWVQQKPGQAPRGLIGGTKMLAPGTPARFSGSLLGGKAALT |
| | | LSGVQPEDEAEYYCALWYSNRWVFGGGTKLTVL |
| 1897 | Anti-CD3, | EVQLVESGGGLVQPGGSLKLSCAASGFTFNGYAMNWVRQAPGKGLEWVARIRSK |
| | clone 2H2 | YNNYATYYADEVKDRFTISRDDSKNTAYLQMNNLKTEDTAVYYCVRHGNFGNSP |
| | | ISYWAYWGQGTLVTVSSGGGGSGGGGSGGGGSQTVVTQEPSLTVSPGGTVTLTC |
| | | GSSTGAVVSGNYPNWVQQKPGQAPRGLIGGTEFLAPGTPARFSGSLLGGKAALT |
| | | LSGVQPEDEAEYYCVLWYSNRWVFGGGTKLTVL |
| 1898 | Anti-CD3, | EVQLVESGGGLVQPGGSLKLSCAASGNTFNKYAMNWVRQAPGKGLEWVARIRSK |
| | clone 2A4 | YNNYATYYADSVKDRFTISRDDSKNTAYLQMNNLKTEDTAVYYCVRHGNFGDSY |
| | | ISYWAYWGQGTLVTVSSGGGGSGGGGSGGGGSQTVVTQEPSLTVSPGGTVTLTC |
| | | GSSTGAVTHGNYPNWVQQKPGQAPRGLIGGTKVLAPGTPARFSGSLLGGKAALT |
| | | LSGVQPEDEAEYYCVLWYSNRWVFGGGTKLTVL |
| 1803 | Anti-CD3, | EVQLVESGGGLVQPGGSLKLSCAASGFTFNNYAMNWVRQAPGKGLEWVARIRSG |
| | clone 10B2 | YNNYATYYADSVKDRFTISRDDSKNTAYLQMNNLKTEDTAVYYCVRHGNFGNSY |
| | | ISYWAYWGQGTLVTVSSGGGGSGGGGSGGGGSQTVVTQEPSLTVSPGGTVTLTC |
| | | GSYTGAVTSGNYPNWVQQKPGQAPRGLIGGTKFNAPGTPARFSGSLLGGKAALT |
| | | LSGVQPEDEAEYYCVLWYANRWVFGGGTKLTVL |
| 1804 | Anti-CD3, | EVQLVESGGGLVQPGGSLKLSCAASGFEFNKYAMNWVRQAPGKGLEWVARIRSK |
| | clone 1G4 | YNNYETYYADSVKDRFTISRDDSKNTAYLQMNNLKTEDTAVYYCVRHGNFGNSL |
| | | ISYWAYWGQGTLVTVSSGGGGSGGGGSGGGGSQTVVTQEPSLTVSPGGTVTLTC |
| | | GSSSGAVTSGNYPNWVQQKPGQAPRGLIGGTKFGAPGTPARFSGSLLGGKAALT |
| | | LSGVQPEDEAEYYCVLWYSNRWVFGGGTKLTVL |
| 1805 | wt anti- | EVQLVESGGGLVQPGGSLKLSCAASGFTFNKYAMNWVRQAPGKGLEWVARIRSK |
| | CD3 | YNNYATYYADSVKDRFTISRDDSKNTAYLQMNNLKTEDTAVYYCVRHGNFGNSY |
| | | ISYWAYWGQGTLVTVSSGGGGSGGGGSGGGGSQTVVTQEPSLTVSPGGTVTLTC |
| | | GSSTGAVTSGNYPNWVQQKPGQAPRGLIGGTKFLAPGTPARFSGSLLGGKAALT |
| | | LSGVQPEDEAEYYCVLWYSNRWVFGGGTKLTVL |
| 1806 | Anti-CD3, | EVQLVESGGGLVQPGGSLKLSCAASGFTFNKYALNWVRQAPGKGLEWVARIRSK |
| | clone 2G5 | YNNYATEYADSVKDRFTISRDDSKNTAYLQMNNLKTEDTAVYYCVRHGNFGNSP |
| | | ISYWAYWGQGTLVTVSSGGGGSGGGGSGGGGSQTVVTQEPSLTVSPGGTVTLTC |
| | | GSSTGAVTSGNYPNWVQQKPGQAPRGLIGGTNFLAPGTPERFSGSLLGGKAALT |
| | | LSGVQPEDEAEYYCVLWYSNRWAFGGGTKLTVL |
| 1807 | Anti-CD3, | EVQLVESGGGLVQPGGSLKLSCAASGFTFNEYAMNWVRQAPGKGLEWVARIRSK |
| | clone 8A5 | YNNYATYYADDVKDRFTISRDDSKNTAYLQMNNLKTEDTAVYYCVRHGNFGNSG |
| | | ISYWAYWGQGTLVTVSSGGGGSGGGGSGGGGSQTVVTQEPSLTVSPGGTVTLTC |
| | | GSSTGAVTVGNYPNWVQQKPGQAPRGLIGGTEFLAPGTPARFSGSLLGGKAALT |
| | | LSGVQPEDEAEYYCVLWYSNRWVFGGGTKLTVL |

Linkers

| SEQ ID NO: | Description | AA Sequence |
|---|---|---|
| 1808 | Linker | GGGGSGGGS |
| 1809 | Linker | (GS)n |
| 1810 | Linker | (GGS)n |
| 1811 | Linker | (GGGS)n |
| 1812 | Linker | (GGSG)n |
| 1813 | Linker | (GGSGG)n |
| 1814 | Linker | (GGGGS)n |
| 1815 | Linker | (GGGGG)n |
| 1816 | Linker | (GGG)ₙ |
| 1817 | Linker | (GGGGGGGGSGGGGSGGGGS) |
| 1818 | Linker | GGGGSGGGGSGGGGS |
| 1819 | 6X Histidine | HHHHHH |

CD3 Binding Domain CDR Sequences

| SEQ | | |
|---|---|---|
| ID | CD3 Binding | |
| NO: | Domain CDR | Sequence |
| 1820 | HC CDR1 | GNTENKYAMN |
| | variant 1 | |
| 1821 | HC CDR1 | GFEENKYAMN |
| | variant 2 | |
| 1822 | HC CDR1 | GEMENKYAMN |
| | variant 3 | |
| 1823 | HC CDR1 | GFTYNKYAMN |
| | variant 4 | |
| 1824 | HC CDR1 | GFTENNYAMN |
| | variant 5 | |
| 1825 | HC CDR1 | GFTENGYAMN |
| | variant 6 | |
| 1826 | HC CDR1 | GFTENTYAMN |
| | variant 7 | |
| 1827 | HC CDR1 | GETENEYAMN |
| | variant 8 | |
| 1828 | HC CDR1 | GFTENKYPMN |
| | variant 9 | |
| 1829 | HC CDR1 | GFTENKYAVN |
| | variant 10 | |
| 1830 | HC CDR1 | GFTENKYAIN |
| | variant 11 | |
| 1831 | HC CDR1 | GFTENKYALN |
| | variant 12 | |
| 1832 | HC CDR2 | RIRSGYNNYATYYADSVK |
| | variant 1 | |
| 1833 | HC CDR2 | RIRSKSNNYATYYADSVK |
| | variant 2 | |
| 1834 | HC CDR2 | RIRSKYNKYATYYADSVK |
| | variant 3 | |
| 1835 | HC CDR2 | RIRSKYNNYETYYADSVK |
| | variant 4 | |
| 1836 | HC CDR2 | RIRSKYNNYATEYADSVK |
| | variant 5 | |
| 1837 | HC CDR2 | RIRSKYNNYATYYKDSVK |
| | variant 6 | |
| 1838 | HC CDR2 | RIRSKYNNYATYYADEVK |
| | variant 7 | |
| 1839 | HC CDR2 | RIRSKYNNYATYYADAVK |
| | variant 8 | |
| 1840 | HC CDR2 | RIRSKYNNYATYYADQVK |
| | variant 9 | |
| 1841 | HC CDR2 | RIRSKYNNYATYYADDVK |
| | variant 10 | |
| 1842 | HC CDR3 | HANFGNSYISYWAY |
| | variant 1 | |
| 1843 | HC CDR3 | HTNEGNSYISYWAY |
| | variant 2 | |
| 1844 | HC CDR3 | HGNENNSYISYWAY |
| | variant 3 | |
| 1845 | HC CDR3 | HGNFGDSYISYWAY |
| | variant 4 | |
| 1846 | HC CDR3 | HGNFGNSHISYWAY |
| | variant 5 | |
| 1847 | HC CDR3 | HGNEGNSPISYWAY |
| | variant 6 | |
| 1848 | HC CDR3 | HGNFGNSQISYWAY |
| | variant 7 | |
| 1849 | HC CDR3 | HGNFGNSLISYWAY |
| | variant 8 | |
| 1850 | HC CDR3 | HGNFGNSGISYWAY |
| | variant 9 | |
| 1851 | HC CDR3 | HGNFGNSYISYWAT |
| | variant 10 | |
| 1852 | LC CDR1 | ASSTGAVTSGNYPN |
| | variant 1 | |
| 1853 | LC CDR1 | GESTGAVTSGNYPN |
| | variant 2 | |
| 1854 | LC CDR1 | GSYTGAVTSGNYPN |
| | variant 3 | |
| 1855 | LC CDR1 | GSSFGAVTSGNYPN |
| | variant 4 | |
| 1856 | LC CDR1 | GSSKGAVTSGNYPN |
| | variant 5 | |
| 1857 | LC CDR1 | GSSSGAVTSGNYPN |
| | variant 6 | |
| 1858 | LC CDR1 | GSSTGYVTSGNYPN |
| | variant 7 | |
| 1859 | LC CDR1 | GSSTGAVVSGNYPN |
| | variant 8 | |
| 1860 | LC CDR1 | GSSTGAVTDGNYPN |
| | variant 9 | |
| 1861 | LC CDR1 | GS STGAVTKGNYPN |
| | variant 10 | |
| 1862 | LC CDR1 | GS STGAVTHGNYPN |
| | variant 11 | |
| 1863 | LC CDR1 | GSSTGAVTVGNYPN |
| | variant 12 | |
| 1864 | LC CDR1 | GSSTGAVTSGYYPN |
| | variant 13 | |
| 1865 | LC CDR2 | GIKFLAP |
| | variant 1 | |
| 1866 | LC CDR2 | GTEFLAP |
| | variant 2 | |
| 1867 | LC CDR2 | GTYFLAP |
| | variant 3 | |
| 1868 | LC CDR2 | GTSFLAP |
| | variant 4 | |
| 1869 | LC CDR2 | GTNFLAP |
| | variant 5 | |
| 1870 | LC CDR2 | GTKLLAP |
| | variant 6 | |
| 1871 | LC CDR2 | GTKELAP |
| | variant 7 | |
| 1872 | LC CDR2 | GTKILAP |
| | variant 8 | |
| 1873 | LC CDR2 | GTKMLAP |
| | variant 9 | |
| 1874 | LC CDR2 | GTKVLAP |
| | variant 10 | |
| 1875 | LC CDR2 | GTKENAP |
| | variant 11 | |
| 1876 | LC CDR2 | GTKFGAP |
| | variant 12 | |
| 1877 | LC CDR2 | GTKFLVP |
| | variant 13 | |
| 1878 | LC CDR3 | TLWYSNRWV |
| | variant 1 | |
| 1879 | LC CDR3 | ALWYSNRWV |
| | variant 2 | |
| 1880 | LC CDR3 | VLWYDNRWV |
| | variant 3 | |
| 1881 | LC CDR3 | VLWYANRWV |
| | variant 4 | |
| 1882 | LC CDR3 | VLWYSNSWV |
| | variant 5 | |
| 1883 | LC CDR3 | VLWYSNRWI |
| | variant 6 | |
| 1884 | LC CDR3 | VLWYSNRWA |
| | variant 7 | |
| 1890 | Exemplary | EVQLVESGGGLVQPGGSLKL |
| | anti-DLL3 | SCAASGFTENKYAINWVRQA |
| | trispecific | PGKGLEWVARIRSKYNNYAT |
| | protein | YYADQVKDRETISRDDSKNT |
| | (anti-CD3: | AYLQMNNLKTEDTAVYYCVR |
| | anti-ALB: | HANFGNSYISYWAYWGQGTL |
| | anti-DLL3 | VTVSSGGGGSGGGGSGGGGS |
| | configuration) | QTVVTQEPSLTVSPGGTVTL |
| | (CAT) | TCASSTGAVTSGNYPNWVQQ |
| | | KPGQAPRGLIGGTKFLVPGT |
| | | PARFSGSLLGGKAALTLSGV |
| | | QPEDEAEYYCTLWYSNRWVF |
| | | GGGTKLTVLGGGGSGGGSEV |
| | | QLVESGGGLVQPGNSLRLSC |
| | | AASGFTFSKFGMSWVRQAPG |
| | | KGLEWVSSISGSGRDTLYAD |
| | | SVKGRFTISRDNAKTTLYLQ |
| | | MNSLRPEDTAVYYCTIGGSL |
| | | SVSSQGTLVTVSSGGGGSGG |
| | | GSEVQLVESGGGLVQPGGSL |
| | | TLSCAASSSSVSLLSLAWYR |
| | | QAPGKKRELVAGISDDGSIV |
| | | YMDSVKGRFTISRDNAKNSV |
| | | YLQMNSLRAEDTAVYYCYAY |
| | | SWITRSPYWGQGTLVTVSSH |
| | | HHHHH |
| 1891 | Exemplary | EVQLVESGGGLVQPGGSLTL |
| | anti-DLL3 | SCAASSSSVSLLSLAWYRQA |
| | trispecific | PGKKRELVAGISDDGSIVYM |
| | protein | DSVKGRETISRDNAKNSVYL |
| | (anti-DLL3: | QMNSLRAEDTAVYYCYAYSW |
| | anti-ALB: | ITRSPYWGQGTLVTVSSGGG |
| | anti-CD3 | GSGGGSEVQLVESGGGLVQP |
| | configuration) | GNSLRLSCAASGFTFSKFGM |
| | (TAC) | SWVRQAPGKGLEWVSSISGS |
| | | GRDTLYADSVKGRETISRDN |
| | | AKTTLYLQMNSLRPEDTAVY |
| | | YCTIGGSLSVSSQGTLVTVS |
| | | SGGGGSGGGSEVQLVESGGG |
| | | LVQPGGSLKLSCAASGFTEN |
| | | KYAINWVRQAPGKGLEWVAR |
| | | IRSKYNNYATYYADQVKDRF |
| | | TISRDDSKNTAYLQMNNLKT |
| | | EDTAVYYCVRHANFGNSYIS |
| | | YWAYWGQGTLVTVSSGGGGS |
| | | GGGGSGGGGSQTVVTQEPSL |
| | | TVSPGGTVTLTCASSTGAVT |
| | | SGNYPNWVQQKPGQAPRGLI |
| | | GGTKFLVPGTPARFSGSLLG |
| | | GKAALTLSGVQPEDEAEYYC |
| | | TLWYSNRWVFGGGTKLTVLH |
| | | HHHHH |

DLL3 Protein UniProtKB Accession Q9NYJ7
(SEQ ID NO: 1885)
>sp|Q9NYJ7|DLL3 HUMAN Delta-like protein 3
OS = Homo sapiens OX = 9606
GN = DLL3 PE = 1 SV = 1:
MVSPRMSGLLSQTVILALIFLPQTRPAGVFELQIHSFGPGPGPGA
PRSPCSARLPCRLFFRVCLKPGLSEEAAESPCALGAALSARGPVY
TEQPGAPAPDLPLPDGLLQVPERDAWPGTFSFIIETWREELGDQI
GGPAWSLLARVAGRRRLAAGGPWARDIQRAGAWELRFSYRARCEP
PAVGTACTRLCRPRSAPSRCGPGLRPCAPLEDECEAPLVCRAGCS
PEHGFCEQPGECRCLEGWTGPLCTVPVSTSSCLSPRGPSSATTGC
LVPGPGPCDGNPCANGGSCSETPRSFECTCPRGFYGLRCEVSGVT
CADGPCFNGGLCVGGADPDSAYICHCPPGFQGSNCEKRVDRCSLQ
PCRNGGLCLDLGHALRCRCRAGFAGPRCEHDLDDCAGRACANGGT
CVEGGGAHRCSCALGFGGRDCRERADPCAARPCAHGGRCYAHFSG
LVCACAPGYMGARCEFPVHPDGASALPAAPPGLRPGDPQRYLLPP
ALGLLVAAGVAGAALLLVHVRRRGHSQDAGSRLLAGTPEPSVHAL
PDALNNLRTQEGSGDGPSSSVDWNRPEDVDPQGIYVISAPSIYAR
EVATPLFPPLHTGRAGQRQHLLFPYPSSILSVK.
51X5 (SEQ ID NO: 1886):
EVQLVESGGGLVQPGGSLTLSCAASLSSVSVLSIAWYRQAPGKKR
ELVAGISTDGSTVYIDSVKGRFTISRDNAKNSVYLQMNSLRAEDT
AVYYCYAYSWTTSLPYWGQGTLVTVSS.
51X5 CDR1
(SEQ ID NO: 1887)
LSSVSVLSIA.
51X5 CDR2
(SEQ ID NO: 1888):
GISTDGSTVYIDSVKG
51X5 CDR3
(SEQ ID NO: 1889):
YSWTTSLPY
>NP_058637.1 delta-like protein 3 isoform 1
precursor [Homo sapiens]
(SEQ ID NO: 1892):
MVSPRMSGLLSQTVILALIFLPQTRPAGVFELQIHSFGPGPGPGA
PRSPCSARLPCRLFFRVCLKPGLSEEAAESPCALGAALSARGPVY
TEQPGAPAPDLPLPDGLLQVPERDAWPGTESFIIETWREELGDQI
GGPAWSLLARVAGRRRLAAGGPWARDIQRAGAWELRFSYRARCEP
PAVGTACTRLCRPRSAPSRCGPGLRPCAPLEDECEAPLVCRAGCS
PEHGFCEQPGECRCLEGWTGPLCTVPVSTSSCLSPRGPSSATTGC
LVPGPGPCDGNPCANGGSCSETPRSFECTCPRGFYGLRCEVSGVT
CADGPCFNGGLCVGGADPDSAYICHCPPGFQGSNCEKRVDRCSLQ
PCRNGGLCLDLGHALRCRCRAGFAGPRCEHDLDDCAGRACANGGT
CVEGGGAHRCSCALGFGGRDCRERADPCAARPCAHGGRCYAHFSG
LVCACAPGYMGARCEFPVHPDGASALPAAPPGLRPGDPQRYLLPP
ALGLLVAAGVAGAALLLVHVRRRGHSQDAGSRLLAGTPEPSVHAL
PDALNNLRTQEGSGDGPSSSVDWNRPEDVDPQGIYVISAPSIYAR
EVATPLFPPLHTGRAGQRQHLLFPYPSSILSVK.
DLL3 Protein Sequence (SEQ ID NO: 1893):
RSPCSARLPCRLFFRVCLKPGLSEEAAESPCALGAALSARGPVYT
EQPGAPAPDLPLPDGLLQVPFRDAWPGTFSFIIETWREELGDQIG
GPAWSLLARVAGRRRLAAGGPWARDIQRAGAWELRFSYRARCEPP
AVGTACTRLCRPRSAPSRCGPGLRPCAPLEDECEAPLVCRAGCSP
EHGFCEQPGECRCLEGWTGPLCTVPVSTSSCLSPRGPSSATTGCL
VPGPGPCDGNPCANGGSCSETPRSFECTCPRGFYGLRCEVSGVTC
ADGPCENGGLCVGGADPDSAYICHCPPGFQGSNCEKRVDRCSLQP
CRNGGLCLDLGHALRCRCRAGFAGPRCEHDLDDCAGRACANGGTC
VEGGGAHRCSCALGFGGRDCRERADPCAARPCAHGGRCYAHFSGL
VCACAPGYMGARCEFPVHPDGASALPAAPPGLRPGDPQRYL.

The application's sequence listing, which the Patent Office published only in electronic form, follows.

SEQUENCE LISTING (1898 sequences)

SEQ ID NO: 1 - protein, 115 aa, synthetic construct
  REGION 1..115: note = Synthetic Construct
QVQLQESGGGLVQAGGSLRLSCAASGSIFSIASMGWYRQAPGKQRELVAVITSFSSTNYADSVKGRFTISRDNAKNTVYLQMNSLKPEDTGVYYCNARYFERTDWGQGTQVTVSS

SEQ ID NO: 2 - protein, 115 aa, synthetic construct
  REGION 1..115: note = Synthetic Construct
QVQLQESGGGLVQAGGSLRLSCAAPGSIFSIASMGWYRQAPGKQRELVAVITSFSSTNYADSVKGRFTISRDNAKNTVYLQMNSLKPEDTGVYYCNARYFERTDWGQGTQVTVSS

SEQ ID NO: 3 - protein, 115 aa, synthetic construct
  REGION 1..115: note = Synthetic Construct
QVQLQESGGGLVQAGGSLRLSCAASGSIFSIASMAWYRQAPGKQRELVAAITSFSSTNYADSVKGRFTISRDNAKNTVYLQMNSLKPEDTGVYYCNARYFERTDWGQGTQVTVSS

SEQ ID NO: 4 - protein, 115 aa, synthetic construct
  REGION 1..115: note = Synthetic Construct
QVQLQESGGGLVQAGGSLRLSCAASESIFSINVMAWHRQAPGKQRELVARITSGGSTNYADSVKGRFTISRDNAKNTVYLQMNSLKPEDTGVYYCGAYQGLYAYWGQGTQVTVSS

SEQ ID NO: 5 - protein, 115 aa, synthetic construct
  REGION 1..115: note = Synthetic Construct
QVQLQESGGGLVQAGGSLRLSCVASGSSFSITSMAWYRQAPGKQRDLVAAITSFGSTNYADSVKDRFTISRDNAKNTVYLQMNSLKPEDTAVYYCNGRVFDHVYWGQGTQVTVSS

SEQ ID NO: 6 - protein, 115 aa, synthetic construct
  REGION 1..115: note = Synthetic Construct
QVQLQESGGGLVQAGGSLKLSCAASSSIFSISSMSWYRQAPGKQRELVAAITTFDYTNYADSVKGRFTISRDNAKNMMYLQMNSLKPEDTAVYLCNARAFGRDYWGQGTQVTVSS

SEQ ID NO: 7 - protein, 115 aa, synthetic construct
  REGION 1..115: note = Synthetic Construct
QVQLQESGGGLVQAGGSLKLSCAASSSIFSISSMSWYRQAPGKQRELVAAITSFGSTNYADSVKGRFTISRDNAKNMMYLQMNSLKPEDTAVYRCNARTMGRDYWGQGTQVTVSS

SEQ ID NO: 8 - protein, 116 aa, synthetic construct
  REGION 1..116: note = Synthetic Construct
QVQLQESGGGLVQPGGSLRLSCAASGSTLNIKIMAWHRQAPGKQRELVATLTSGGNTNYADSVKGRFTISRDNAKNTVYLQMNSLQPEDTAVYYCGLWDGVGGAYWGRGTQVTVSS

SEQ ID NO: 9 - protein, 116 aa, synthetic construct
  REGION 1..116: note = Synthetic Construct
QVQLQESGGGLVQPGGSLRISCAASGSTLNIKIMAWHRQAPGKQRELVATLTSGGNTNYADSVKGRFTISRDNAKNTVYLQMNSLQPEDTAVYYCGLWDGVGGAYWGRGTQVTVSS

SEQ ID NO: 10 - protein, 116 aa, synthetic construct
  REGION 1..116: note = Synthetic Construct
QVQLQESGGGLVQAGGSLRLSCAASGSTFNIKTMAWHRQAPGNQRELVATLTSGGNTNYADSVKGRFTISRDNAKNTVYLQMNSLKPEDTAVYYCGLWNGVGGAYWGRGTQVTVSS

SEQ ID NO: 11 - protein, 115 aa, synthetic construct
  REGION 1..115: note = Synthetic Construct
QVQLQDGGGLVQPGGSLRLSCAASGSTFNIKLMAWHRQAPGNQRELVATLTSGGNTNYADSVKGRFTISRDNASNIVYLQMNSLKPEDTAVYYCGLWDGVGGAYWGRGTQVTVSS

SEQ ID NO: 12 - protein, 116 aa, synthetic construct
  REGION 1..116: note = Synthetic Construct
QVQLQESGGGLVQAGGSLRLSCAASGSTFNFKIMAWHRQAPGKQRELVASLTSEGLTNYRDSVKGRFTISRDNAKNTVYLQMNNLKPEDTAVYYCGLWDGVGGAYWGRGTQVTVSS

SEQ ID NO: 13 - protein, 114 aa, synthetic construct
  REGION 1..114: note = Synthetic Construct
QVQLQESGGGLVQPGGSLRLSCAASGFMFSSYSMSWYRQAPGKQRELVAAITTWGSTNYADSVKGRFTISRDNAKNTVWLQMNSLEPEDTAVYFCNARSWNNYWGQGTQVTVSS

SEQ ID NO: 14 - protein, 114 aa, synthetic construct
  REGION 1..114: note = Synthetic Construct
QVQLQESGGGLVQVGGSLRLSCAASGFMFSSYSMSWYRQAPGKQRELVAAITSYGSTNYADSVKGRFTISRDNAKNTVWLQMNSLKPEDTAVYFCNARSWNNYWGQGTQVTVSS

SEQ ID NO: 15 - protein, 114 aa, synthetic construct
  REGION 1..114: note = Synthetic Construct
QVQLQESGGGLVQPGGSLRLSCAASGFTFSSHSMSWYRQAPGKQRELVAAITTYGSTNYIDSVKGRFTISRDNTKNTVYLQMNSLKPEDTAVYFCNARSWNNYWGQGTQVTVSS

SEQ ID NO: 16 - protein, 117 aa, synthetic construct
  REGION 1..117: note = Synthetic Construct
QVQLQESGGGLVQAGGSLRLSCVASGSSFSHNTMGWYRQAPGKQRDLVARITTFGTTNYADSVKGRFTISRDNAKNTVYLQMNSLKPEDTAVYYCNGESFGRIWYNWGQGTQVTVSS

SEQ ID NO: 17 - protein, 116 aa, synthetic construct
  REGION 1..116: note = Synthetic Construct
QVQLQESGGGLVQAGASLRLTCTASGGRFSYATMGWSRQAPGKQREMVARITSSGFSTNYADSVKGRFTISRDNAKNAVYLQMDSLKPEDTAVYYCNAQHFGTDSWGQGTQVTVSS

SEQ ID NO: 18 - protein, 116 aa, synthetic construct
  REGION 1..116: note = Synthetic Construct
QVQLQESGGGLVQAGASLRLTCTASGSRFSYATMGWSRQAPGKQRELVARITSSGFSTNYADSVKGRFTISRDNAKNAVYLQMDSLKPEDTAVYYCNAQQFGTDSWGQGTQVTVSS

SEQ ID NO: 19 - protein, 117 aa, synthetic construct
  REGION 1..117: note = Synthetic Construct
QVQLQESGGGLVQAGGSLRLSCAASGSTFTSNVMGWHRQAPGKQRELVANMHSGGSTNYADSVKGRFTISRDNAKNIVYLQMNNLKIEDTAVYYCRWYGIQRAEGYWGQGTQVTVSS

SEQ ID NO: 20 - protein, 117 aa, synthetic construct
  REGION 1..117: note = Synthetic Construct
QVQLQESGGGLVVAGGSLRLSCAASGSSVSFLSMAWYRQAPGKKRELVAGISVDGSTNYADSVKGRFTVSRDNAKNTVYLQMNSLQPEDTAVYYCYAYRWVGRDTYWGQGTQVTVSS

SEQ ID NO: 21 - protein, 117 aa, synthetic construct
  REGION 1..117: note = Synthetic Construct
QVQLQESGGGLVVAGGSLRLSCAASGSSVSFLSMAWYRQAPGKKRELVAGISVDGSTNYADSVKGRFTISRDNAKNTVYLQMNSLQPEDTAVYYCYAYRWVGRDTYWGQGTQVTVSS

SEQ ID NO: 22 - protein, 117 aa, synthetic construct
  REGION 1..117: note = Synthetic Construct
QVQLQESGGGLVVSGGSLRLSCAASGSSVSFLSMAWYRQAPGKKRELVAGISVDGSTNYADSVKGRFTISRDNAKNTVYLQMNSLQPEDTAAYYCYAYRWVGRDTYWGQGTQVTVSS

SEQ ID NO: 23 - protein, 117 aa, synthetic construct
  REGION 1..117: note = Synthetic Construct
QVQLQESGGGLVVAGGSLRLSCAASGSSVSFLSMAWYRQAPGKKRELVAGISVDGSTNYADSVKGRFTISRDNAENTVYLQMNSLQPEDTAVYYCYAYRWEGRDTYWGQGTQVTVSS

SEQ ID NO: 24 - protein, 117 aa, synthetic construct
  REGION 1..117: note = Synthetic Construct
QVQLQESGGGLVVAGGSLRLSCAASGSSVSFLSMAWYRQAPGKKRELVAGISVDGSTNYADSVKGRFTISRDNAENTVYLQMNSLQPEDTAVYYCYAYRWEGRNTYWGQGTQVTVSS

SEQ ID NO: 25 - protein, 117 aa, synthetic construct
  REGION 1..117: note = Synthetic Construct
QVQLQESGGGLVQPGGSLRLSCAASGSSVSFLSMAWYRQAPGKKRELVAGISTDGSTNYVDSVKGRFTISRDNAKNTVYLQMNSLQPEDTAVYYCYAYRWVGRYTYWGQGTQVTVSS

SEQ ID NO: 26 - protein, 117 aa, synthetic construct
  REGION 1..117: note = Synthetic Construct
QVQLQESGGGLVVAGGSLRLSCAASGSSVSFLSMAWYRQAPGKKRELVAGISTDGTTNYVDSVKDRFTISRDNAKNTVYLQMNSLQPEDTAAYYCYAYRWVGRDTYWGQGTQVTVSS

SEQ ID NO: 27 - protein, 117 aa, synthetic construct
  REGION 1..117: note = Synthetic Construct
QVQLQESGGGLVVAGGSLRLSCAASGSSVSFLSIAWYRQAPGKKRELVAGISTDGTTNYVDSVKDRFTISRDNAKNTVYLQMNSLQPEDTAAYYCYAYRWVGRDTYWGQGTQVTVSS

SEQ ID NO: 28 - protein, 117 aa, synthetic construct
  REGION 1..117: note = Synthetic Construct
QVQLQESGGGLVQAGGSLTLSCAASGSSVSFLSMAWYRQAPGKKRELVAGISTDGTTNYVDSVKDRFTISRDNAKNTVYLQMNSLQPEDTAAYYCYAYRWVGRDTYWGQGTQVTVSS

SEQ ID NO: 29 - protein, 117 aa, synthetic construct
  REGION 1..117: note = Synthetic Construct
QVQLQESGGGLVQAGGSLRLSCAASGSSVSFLSMAWYRQAPGKKRELVAGISTDGSTNYADSVKGRFTISEGNAKNTVDLQMNSLQPEDTAVYYCYAYRWVDRYTYWGQGTQVTVSS

SEQ ID NO: 30 - protein, 117 aa, synthetic construct
  REGION 1..117: note = Synthetic Construct
QVQLQESGGGLVVAGGSLRLSCAASGSSVSFLSMAWYRQAPGKKRELVAGISTDGSTNYADSVKGRFTISEDNAKNTVDLQMNSLQPEDTAVYYCYAYRWIDRYTYWGQGTQVTVSS

SEQ ID NO: 31 - protein, 117 aa, synthetic construct
  REGION 1..117: note = Synthetic Construct
QVQLQESGGGLVQPGGSLRLSCAASGSSVSFLSMAWYRQAPGKKRELVAGISTDGSTNYADSVKGRFTISEDNAKNTVDLQMNSLQPEDTAVYYCYAYRWVDRYTYWGQGTQVTVSS

SEQ ID NO: 32 - protein, 117 aa, synthetic construct
  REGION 1..117: note = Synthetic Construct
QVQLQESGGGLVVAGGSLRLSCAASGSSVSFLSMAWYRQAPGKKRELVAGISSDGSTNYVDSVKGRFTISRDNAKNIVFLQMNSLQPQDTAVYYCYAYRWVGRDTYWGQGTQVTVSS

SEQ ID NO: 33 - protein, 117 aa, synthetic construct
  REGION 1..117: note = Synthetic Construct
QVQLQESGGGLVVAGGSLRLSCAASGSSVSFLSMAWYRQAPGKKRELVAGISADGSTDYIDSVKGRFTISRDSANNTMYLQMNSLQPEDTAVYYCYAYRWTTRYTYWGQGTQVTVSS

SEQ ID NO: 34 - protein, 117 aa, synthetic construct
  REGION 1..117: note = Synthetic Construct
QVQLQESGGGLVQPGGSLRLSCAASGFTLDYYAIGWYRQAPGKKRELVAGISSDGSTHYVDSVKGRFAISRDNAENTVYLQMNDLQPDDTAVYYCYAYRWVGGYTYWGQGTQVTVSS

SEQ ID NO: 35 - protein, 119 aa, synthetic construct
  REGION 1..119: note = Synthetic Construct
QVQLQESGGGLVQAGGSLRLSCVASGSTSSINAMGWYRRAPGKQRELVAGISSDGSKNYADSVKGRFTISRDNAKNTVYLQMNSLKPEDTAVYYCYYFRTVAASSMQYWGQGTQVTVSS

SEQ ID NO: 36 - protein, 119 aa, synthetic construct
  REGION 1..119: note = Synthetic Construct
QVQLQESGGGLVQAGGSLRLSCVASGSTSSINAMGWYRRAPGKQRELVAGISSDGSKVYADSVKGRFTISRDNAKNTVYLQMNSLKPEDTAVFYCYYFRTVSGSSMRYWGQGTQVTVSS

SEQ ID NO: 37 - protein, 118 aa, synthetic construct
  REGION 1..118: note = Synthetic Construct
QVQLQESGGGLVQAGGSLRLSCAASGITSSVYSMGWYRQAPGKQRELVAGSSSDGSTHYVDSVRGRFTISRDNAKNTVYLQMSSLKPEDTAVYYCYANRGFAGAPSYWGQGTQVTVSS

SEQ ID NO: 38 - protein, 114 aa, synthetic construct
  REGION 1..114: note = Synthetic Construct
QVQLQESGGGLVQAGGSLRLSCAASGRTSMFNSMGWHRQAPGKQRELVAIIRSGGSSNYADTVKGRFTISRDNTKNTVYLQMNDLKPEDTAVYYCFYYFQSSYWGQGTQVTVSS

SEQ ID NO: 39 - protein, 114 aa, synthetic construct
  REGION 1..114: note = Synthetic Construct
QVQLQESGGGLVQAGGSLRLSCAASGRTSMVNSMGWHRQAPGKQRELVALITSGGSSNYADTVKGRFTISRDNTKNTVYLQMNDLKPEDTAVYYCFYYFQSSYWGQGTQVTVSS

SEQ ID NO: 40 - protein, 114 aa, synthetic construct
  REGION 1..114: note = Synthetic Construct
QVQLQESGGGLVQAGGSLRLSCAASGSVSMFNSMGWHRQPPGKQRELVAIITSGGSSNYADTVKGRFTISRDNTKNTVYLQMNDLKPEDTAVYYCFYYFQSSYWGQGTQVTVSS

SEQ ID NO: 41 - protein, 119 aa, synthetic construct
  REGION 1..119: note = Synthetic Construct
QVQLQESGGGLVQAGGSLRLSCTASGSIFSIAVMGWYRQVPGKRREWVATIFDGSYTNYADSVKGRFTISRDNARNKVYLQMNNLKPEDTAVYYCQTHWTQGSVPKESWGQGTQVTVSS

SEQ ID NO: 42 - protein, 115 aa, synthetic construct
  REGION 1..115: note = Synthetic Construct
QVQLQESGGGLVQAGGSLRLSCVASSGIFSDMSMVWYRQAPGKQRELVASITTFGSTNYADPVKGRFTISRDNAKNTVYLQMNSLKPEDTAVYYCSGRSYSSDYWGRGTQVTVSS

SEQ ID NO: 43 - protein, 115 aa, synthetic construct
  REGION 1..115: note = Synthetic Construct
QVQLQESGGGLVQAGGSLRLSCVASGSISSIIVMGWSRQAPGKQRESVATITRDGTRNYADSLKGRFTISRDNAKNTSYLQINSLKPEDTAVYSCYARYGDINYWGKGTQVTVSS

SEQ ID NO: 44 - protein, 115 aa, synthetic construct
  REGION 1..115: note = Synthetic Construct
QVQLQESGGGLVQAGGSLRLSCVASGSISSIIVMGWSRQAPGKQRESLATISRGGTRTYADSVKGRFTISRDNAKNTSYLQMNSLKPEDTAVYSCYARYGDINYWGKGTQVTVSS

SEQ ID NO: 45 - protein, 114 aa, synthetic construct
  REGION 1..114: note = Synthetic Construct
QVQLQESGGGLVQAGGSLRLSCVASGSIFTTNSMGWHRQGPGKQRELVALIGSAGSTKYADSVKGRFTISRDNAKNTVSLQMDSLKPEDTAVYYCFYYDSRSYWGQGTQVTVSS

SEQ ID NO: 46 - protein, 114 aa, synthetic construct
  REGION 1..114: note = Synthetic Construct
QVQLQESGGGMVQPGGSLRLSCAASGSREISTMGWHRQAPGKQRELAARITSGGITKYADSVKGRFTISRDNAKKTVYLQMNSLKSEDTAVYYCFAYDNINAYWGQGTQVTVSS

SEQ ID NO: 47 - protein, 114 aa, synthetic construct
  REGION 1..114: note = Synthetic Construct
QVQLQESGGGWVQAGGSLRLSCAASGSREISTMGWHRQAPGKQRELAARITSGGITKYADSVKGRFTISRDNAKKTVYLQMNSLKSEDTAVYYCFAYDNINAYWGQGTQVTVSS

SEQ ID NO: 48 - protein, 114 aa, synthetic construct
  REGION 1..114: note = Synthetic Construct
QVQLQESGGGWVQAGGSLRLSCTASGSREISTMGWHRQAPGKQRELAARITSGGITKYADSVKGRFTISRDNAKKTVYLQMDSLKSEDTAVYYCFAYDNINAYWGQGTQVTVSS

SEQ ID NO: 49 - protein, 114 aa, synthetic construct
  REGION 1..114: note = Synthetic Construct
QVQLQESGGGSVQAGRSLGLSCAASGSREISTMGWHRQAPGKQRELAARITSGGITKYADSVKGRFTISRDNAKKTVYLQMNSLKSEDTAVYYCFAYDNINAYWGQGTQVTVSS

SEQ ID NO: 50 - protein, 115 aa, synthetic construct
  REGION 1..115: note = Synthetic Construct
QVQLQESGGGLVQAGGSLRLSCTASGSIFRGAAMYWHRQAPGKQRELVAAITTSGNTSYADSVKGRFTISRDNAKNTMYLQIISLKPEDTAVYYCAFWIAGKAYWGQGTQVTVSS

SEQ ID NO: 51 - protein, 115 aa, synthetic construct
  REGION 1..115: note = Synthetic Construct
QVQLQESGGGLVQPGGSLRLSCAASGSISSFNFMSWHRQAPGKERELAGVITRGGATNYADSVKGRFTISRDNVKNTVYLQMNGLKPEDTAVYYCHGRSQLGSTWGQGTQVTVSS

SEQ ID NO: 52 - protein, 116 aa, synthetic construct
  REGION 1..116: note = Synthetic Construct
QVQLQESGGGLVQAGGSLRLSCLASGTIFTASTMGWHRQPPGKQRELVASIAGDGRTNYAESTEGRFTISRDDAKNTMYLQMNSLKPEDTAVYYCYAYYLDTYAYWGQGTQVTVSS

SEQ ID NO: 53 - protein, 115 aa, synthetic construct
  REGION 1..115: note = Synthetic Construct
EVQLVESGGGLVQPGGSLTLSCAASGSIFSIASMGWYRQAPGKQRELVAVITSFSSTNYADSVKGRFTISRDNAKNSVYLQMNSLRAEDTAVYYCNARYFERTDWGQGTLVTVSS

SEQ ID NO: 54 - protein, 114 aa, synthetic construct
  REGION 1..114: note = Synthetic Construct
EVQLVESGGGLVQPGGSLTLSCAASGRTSMFNSMGWHRQAPGKQRELVAIIRSGGSSNYADTVKGRFTISRDNAKNSVYLQMNSLRAEDTAVYYCFYYFQSSYWGQGTLVTVSS

SEQ ID NO: 55 - protein, 117 aa, synthetic construct
  REGION 1..117: note = Synthetic Construct
EVQLVESGGGLVQPGGSLTLSCAASGSSVSFLSMAWYRQAPGKKRELVAGISVDGSTNYADSVKGRFTISRDNAKNSVYLQMNSLRAEDTAVYYCYAYRWVGRDTYWGQGTLVTVSS

SEQ ID NO: 56 - protein, 115 aa, synthetic construct
  REGION 1..115: note = Synthetic Construct
EVQLVESGGGLVQPGGSLTLSCTASGSIFRGAAMYWHRQAPGKQRELVAAITTSGNTSYADSVKGRFTISRDNAKNSMYLQMNSLRAEDTAVYYCAFWIAGKAYWGQGTLVTVSS

SEQ ID NO: 57 - protein, 116 aa, synthetic construct
  REGION 1..116: note = Synthetic Construct
EVQLVESGGGLVQPGGSLTLSCAASGSTFNIKTMAWHRQAPGNQRELVATLTSGGNTNYADSVKGRFTISRDNAKNSVYLQMNSLRAEDTAVYYCGLWNGVGGAYWGQGTLVTVSS

SEQ ID NO: 58 - protein, 116 aa, synthetic construct
  REGION 1..116: note = Synthetic Construct
EVQLVESGGGLVQPGGSLTLSCAASGSTLNIKIMAWHRQAPGKQRELVATLTSGGNTNYADSVKGRFTISRDNAKNSVYLQMNSLRAEDTAVYYCGLWDGVGGAYWGQGTLVTVSS

SEQ ID NO: 59 - protein, 115 aa, synthetic construct
  REGION 1..115: note = Synthetic Construct
EVQLVESGGGLVQPGGSLTLSCAASSSIFSISSMSWYRQAPGKQRELVAAITTFDYTNYADSVKGRFTISRDNAKNSMYLQMNSLRAEDTAVYYCNARAFGRDYWGQGTLVTVSS

SEQ ID NO: 60 - protein, 119 aa, synthetic construct
  REGION 1..119: note = Synthetic Construct
EVQLVESGGGLVQPGGSLTLSCVASGSTSSINAMGWYRRAPGKQRELVAGISSDGSKNYADSVKGRFTISRDNAKNSVYLQMNSLRAEDTAVYYCYYFRTVAASSMQYWGQGTLVTVSS

SEQ ID NO: 61 - protein, 114 aa, synthetic construct
  REGION 1..114: note = Synthetic Construct
EVQLVESGGGLVQPGGSLTLSCAASGFMFSSYSMSWYRQAPGKQRELVAAITSYGSTNYADSVKGRFTISRDNAKNSVYLQMNSLRAEDTAVYYCNARSWNNYWGQGTLVTVSS

SEQ ID NO: 62 - protein, 114 aa, synthetic construct
  REGION 1..114: note = Synthetic Construct
EVQLVESGGGLVQPGGSLTLSCAASGSVSMFNSMGWHRQPPGKQRELVAIITSGGSSNYADTVKGRFTISRDNAKNSVYLQMNSLRAEDTAVYYCFYYFQSSYWGQGTLVTVSS

SEQ ID NO: 63 - protein, 116 aa, synthetic construct
  REGION 1..116: note = Synthetic Construct
EVQLVESGGGLVQPGGSLTLSCTASGGRFSYATMGWSRQAPGKQREMVARITSSGFSTNYADSVKGRFTISRDNAKNSVYLQMNSLRAEDTAVYYCNAQHFGTDSWGQGTLVTVSS

SEQ ID NO: 64 - protein, 115 aa, synthetic construct
  REGION 1..115: note = Synthetic Construct
EVQLVESGGGLVQPGGSLTLSCAASGSISSFNFMSWHRQAPGKERELAGVITRGGATNYADSVKGRFTISRDNAKNSVYLQMNSLRAEDTAVYYCHGRSQLGSTWGQGTLVTVSS

SEQ ID NO: 65 - protein, 115 aa, synthetic construct
  REGION 1..115: note = Synthetic Construct
EVQLVESGGGLVQPGGSLTLSCAASESIFSINVMAWHRQAPGKQRELVARITSGGSTNYADSVKGRFTISRDNAKNSVYLQMNSLRAEDTAVYYCGAYQGLYAYWGQGTLVTVSS

SEQ ID NO: 66 - protein, 114 aa, synthetic construct
  REGION 1..114: note = Synthetic Construct
EVQLVESGGGLVQPGGSLTLSCAASGSREISTMGWHRQAPGKQRELAARITSGGITKYADSVKGRFTISRDNAKNSVYLQMNSLRAEDTAVYYCFAYDNINAYWGQGTLVTVSS

SEQ ID NO: 67 - protein, 119 aa, synthetic construct
  REGION 1..119: note = Synthetic Construct
EVQLVESGGGLVQPGGSLTLSCTASGSIFSIAVMGWYRQVPGKRREWVATIFDGSYTNYADSVKGRFTISRDNAKNSVYLQMNSLRAEDTAVYYCQTHWTQGSVPKESWGQGTLVTVSS

SEQ ID NO: 68 - protein, 119 aa, synthetic construct
  REGION 1..119: note = Synthetic Construct
EVQLVESGGGLVQPGGSLTLSCVASGSTSSINAMGWYRRAPGKQRELVAGISSDGSKVYADSVKGRFTISRDNAKNSVYLQMNSLRAEDTAVYYCYYFRTVSGSSMRYWGQGTLVTVSS

SEQ ID NO: 69 - protein, 115 aa, synthetic construct
  REGION 1..115: note = Synthetic Construct
EVQLVESGGGLVQPGGSLTLSCVASSGIFSDMSMVWYRQAPGKQRELVASITTFGSTNYADPVKGRFTISRDNAKNSVYLQMNSLRAEDTAVYYCSGRSYSSDYWGQGTLVTVSS

SEQ ID NO: 70 - protein, 114 aa, synthetic construct
  REGION 1..114: note = Synthetic Construct
EVQLVESGGGLVQPGGSLTLSCAASGFMFSSYSMSWYRQAPGKQRELVAAITTWGSTNYADSVKGRFTISRDNAKNSVYLQMNSLRAEDTAVYYCNARSWNNYWGQGTLVTVSS

SEQ ID NO: 71 - protein, 116 aa, synthetic construct
  REGION 1..116: note = Synthetic Construct
EVQLVESGGGLVQPGGSLTLSCTASGSRFSYATMGWSRQAPGKQRELVARITSSGFSTNYADSVKGRFTISRDNAKNSVYLQMNSLRAEDTAVYYCNAQQFGTDSWGQGTLVTVSS

SEQ ID NO: 72 - protein, 117 aa, synthetic construct
  REGION 1..117: note = Synthetic Construct
EVQLVESGGGLVQPGGSLTLSCAASGSTFTSNVMGWHRQAPGKQRELVANMHSGGSTNYADSVKGRFTISRDNAKNSVYLQMNSLRAEDTAVYYCRWYGIQRAEGYWGQGTLVTVSS

SEQ ID NO: 73 - protein, 117 aa, synthetic construct
  REGION 1..117: note = Synthetic Construct
EVQLVESGGGLVQPGGSLTLSCAASGSSVSFLSMAWYRQAPGKKRELVAGISTDGSTNYVDSVKGRFTISRDNAKNSVYLQMNSLRAEDTAVYYCYAYRWVGRYTYWGQGTLVTVSS

SEQ ID NO: 74 - protein, 115 aa, synthetic construct
  REGION 1..115: note = Synthetic Construct
EVQLVESGGGLVQPGGSLTLSCVASGSISSIIVMGWSRQAPGKQRESVATITRDGTRNYADSLKGRFTISRDNAKNSSYLQMNSLRAEDTAVYYCYARYGDINYWGQGTLVTVSS

SEQ ID NO: 75 - protein, 117 aa, synthetic construct
  REGION 1..117: note = Synthetic Construct
EVQLVESGGGLVQPGGSLTLSCAASGSSVSFLSMAWYRQAPGKKRELVAGISADGSTDYIDSVKGRFTISRDNAKNSVYLQMNSLRAEDTAVYYCYAYRWTTRYTYWGQGTLVTVSS

SEQ ID NO: 76 - protein, 116 aa, synthetic construct
  REGION 1..116: note = Synthetic Construct
EVQLVESGGGLVQPGGSLTLSCLASGTIFTASTMGWHRQPPGKQRELVASIAGDGRTNYAESTEGRFTISRDNAKNSMYLQMNSLRAEDTAVYYCYAYYLDTYAYWGQGTLVTVSS

SEQ ID NO: 77 - protein, 117 aa, synthetic construct
  REGION 1..117: note = Synthetic Construct
EVQLVESGGGLVQPGGSLTLSCAASGSSVSFLSMAWYRQAPGKKRELVAGISVDGSTNYADSVKGRFTISRDNAKNSVYLQMNSLRAEDTAVYYCYAYRWEGRNTYWGQGTLVTVSS

SEQ ID NO: 78 - protein, 117 aa, synthetic construct
  REGION 1..117: note = Synthetic Construct
EVQLVESGGGLVQPGGSLTLSCVASGSSFSHNTMGWYRQAPGKQRDLVARITTFGTTNYADSVKGRFTISRDNAKNSVYLQMNSLRAEDTAVYYCNGESFGRIWYNWGQGTLVTVSS

SEQ ID NO: 79 - protein, 115 aa, synthetic construct
  REGION 1..115: note = Synthetic Construct
EVQLVESGGGLVQPGGSLTLSCVASGSISSIIVMGWSRQAPGKQRESLATISRGGTRTYADSVKGRFTISRDNAKNSSYLQMNSLRAEDTAVYYCYARYGDINYWGQGTLVTVSS

SEQ ID NO: 80 - protein, 115 aa, synthetic construct
  REGION 1..115: note = Synthetic Construct
EVQLVESGGGLVQPGGSLTLSCVASGSSFSITSMAWYRQAPGKQRDLVAAITSFGSTNYADSVKDRFTISRDNAKNSVYLQMNSLRAEDTAVYYCNGRVFDHVYWGQGTLVTVSS

SEQ ID NO: 81 - protein, 114 aa, synthetic construct
  REGION 1..114: note = Synthetic Construct
EVQLVESGGGLVQPGGSLTLSCAASGRTSMVNSMGWHRQAPGKQRELVALITSGGSSNYADTVKGRFTISRDNAKNSVYLQMNSLRAEDTAVYYCFYYFQSSYWGQGTLVTVSS

SEQ ID NO: 82 - protein, 116 aa, synthetic construct
  REGION 1..116: note = Synthetic Construct
EVQLVESGGGLVQPGGSLTLSCAASGSTFNFKIMAWHRQAPGKQRELVASLTSEGLTNYRDSVKGRFTISRDNAKNSVYLQMNSLRAEDTAVYYCGLWDGVGGAYWGQGTLVTVSS

SEQ ID NO: 83 - protein, 117 aa, synthetic construct
  REGION 1..117: note = Synthetic Construct
EVQLVESGGGLVQPGGSLTLSCAASGFTLDYYAIGWYRQAPGKKRELVAGISSDGSTHYVDSVKGRFTISRDNAKNSVYLQMNSLRAEDTAVYYCYAYRWVGGYTYWGQGTLVTVSS

SEQ ID NO: 84 - protein, 114 aa, synthetic construct
  REGION 1..114: note = Synthetic Construct
EVQLVESGGGLVQPGGSLTLSCVASGSIFTTNSMGWHRQGPGKQRELVALIGSAGSTKYADSVKGRFTISRDNAKNSVYLQMNSLRAEDTAVYYCFYYDSRSYWGQGTLVTVSS

SEQ ID NO: 85 - protein, 118 aa, synthetic construct
  REGION 1..118: note = Synthetic Construct
EVQLVESGGGLVQPGGSLTLSCAASGITSSVYSMGWYRQAPGKQRELVAGSSSDGSTHYVDSVRGRFTISRDNAKNSVYLQMNSLRAEDTAVYYCYANRGFAGAPSYWGQGTLVTVSS

SEQ ID NO: 86 - protein, 115 aa, synthetic construct
  REGION 1..115: note = Synthetic Construct
EVQLVESGGGLVQPGGSLTLSCAASSSIFSISSMSWYRQAPGKQRELVAAITSFGSTNYADSVKGRFTISRDNAKNSMYLQMNSLRAEDTAVYYCNARTMGRDYWGQGTLVTVSS

SEQ ID NO: 87 - protein, 119 aa, synthetic construct
  REGION 1..119: note = Synthetic Construct
EVQLVESGGGLVQPGGSLTLSCVASGFTSSINAMGWYRRAPGKQRELVAGISSDGSFVYADSVKGRFTISRDNAKNSVYLQMNSLRAEDTAVYYCYYFRHVSGSSMRYWGQGTLVTVSS

SEQ ID NO: 88 - protein, 119 aa, synthetic construct
  REGION 1..119: note = Synthetic Construct
EVQLVESGGGLVQPGGSLTLSCVASGSTSSINAMAWYRRAPGKQRELVAGISSDGSKVYADSVKGRFTISRDNAKNSVYLQMNSLRAEDTAVYYCYYFRTVSGSSSRYWGQGTLVTVSS

SEQ ID NO: 89 - protein, 119 aa, synthetic construct
  REGION 1..119: note = Synthetic Construct
EVQLVESGGGLVQPGGSLTLSCVASGSTSSINAMGWYRRAPGKQRELVAGISSDGSKVYEDSVKGRFTISRDNAKNSVYLQMNSLRAEDTAVYYCYYFRTVSGSSMRYWGQGTLVTVSS

SEQ ID NO: 90 - protein, 119 aa, synthetic construct
  REGION 1..119: note = Synthetic Construct
EVQLVESGGGLVQPGGSLTLSCVASGSPSSINAMGWYRRAPGKQRELSAGISSDGSKVYADSVKGRFTISRDNAKNSVYLQMNSLRAEDTAVYYCYYFRTVRGSSMSYWGQGTLVTVSS

SEQ ID NO: 91 - protein, 119 aa, synthetic construct
  REGION 1..119: note = Synthetic Construct
EVQLVESGGGLVQPGGSLTLSCVASGSTSSINAMGWYRRAPGKQRELAAGISSDGSSVYADSVKGRFTISRDNAKNSVYLQMNSLRAEDTAVYYCYYFRTVSGSSKRYWGQGTLVTVSS

SEQ ID NO: 92 - protein, 119 aa, synthetic construct
  REGION 1..119: note = Synthetic Construct
EVQLVESGGGLVQPGGSLTLSCVASGSISSINAMGWYRRAPGKQRELVAGISSDGSKVYADSVKGRFTISRDNAKNSVYLQMNSLRAEDTAVYYCYYFRMVSGSSMRYWGQGTLVTVSS

SEQ ID NO: 93 - protein, 119 aa, synthetic construct
  REGION 1..119: note = Synthetic Construct
EVQLVESGGGLVQPGGSLTLSCVASGSTSSINAMAWYRRAPGKQRELVAGISSDGSKLYADSVKGRFTISRDNAKNSVYLQMNSLRAEDTAVYYCYYFRTVQGSSMRYWGQGTLVTVSS

SEQ ID NO: 94 - protein, 119 aa, synthetic construct
  REGION 1..119: note = Synthetic Construct
EVQLVESGGGLVQPGGSLTLSCVASGSTSSINAYGWYRRAPGKQRELVAGISSDGSKVYADSVKGRFTISRDNAKNSVYLQMNSLRAEDTAVYYCYYFRTVYGSSMRYWGQGTLVTVSS

SEQ ID NO: 95 - protein, 119 aa, synthetic construct
  REGION 1..119: note = Synthetic Construct
EVQLVESGGGLVQPGGSLTLSCVASGSTSSINAIGWYRRAPGKQRELVAGISSDGSKVYIDSVKGRFTISRDNAKNSVYLQMNSLRAEDTAVYYCYYFRTVSGSSYRYWGQGTLVTVSS

SEQ ID NO: 96 - protein, 119 aa, synthetic construct
  REGION 1..119: note = Synthetic Construct
EVQLVESGGGLVQPGGSLTLSCVASGSTSSINAMAWYRRAPGKQRELVAGISSDGSKVYSDSVKGRFTISRDNAKNSVYLQMNSLRAEDTAVYYCYYFRTVLGSSMRYWGQGTLVTVSS

SEQ ID NO: 97 - protein, 119 aa, synthetic construct
  REGION 1..119: note = Synthetic Construct
EVQLVESGGGLVQPGGSLTLSCVASGSTSIINAMGWYRRAPGKQRELAAGISSDGSKVIADSVKGRFTISRDNAKNSVYLQMNSLRAEDTAVYYCYYFRRVSGSSMRYWGQGTLVTVSS

SEQ ID NO: 98 - protein, 119 aa, synthetic construct
  REGION 1..119: note = Synthetic Construct
EVQLVESGGGLVQPGGSLTLSCVASGSTSSINAMGWYRRAPGKQRELVAGISSDGSKIYADSVKGRFTISRDNAKNSVYLQMNSLRAEDTAVYYCYYFRTVSGSSMRYWGQGTLVTVSS

SEQ ID NO: 99 - protein, 119 aa, synthetic construct
  REGION 1..119: note = Synthetic Construct
EVQLVESGGGLVQPGGSLTLSCVASGKTSSINAMAWYRRAPGKQRELVAGISSDGSKVYTDSVKGRFTISRDNAKNSVYLQMNSLRAEDTAVYYCYYFRTVSGSSARYWGQGTLVTVSS

SEQ ID NO: 100 - protein, 119 aa, synthetic construct
  REGION 1..119: note = Synthetic Construct
EVQLVESGGGLVQPGGSLTLSCVASGTTSSINAMGWYRRAPGKQRELVAGISSDGSLVYADSVKGRFTISRDNAKNSVYLQMNSLRAEDTAVYYCYYFRIVRGSSMRYWGQGTLVTVSS

SEQ ID NO: 101 - protein, 119 aa, synthetic construct
  REGION 1..119: note = Synthetic Construct
EVQLVESGGGLVQPGGSLTLSCVASGSTSSINAMAWYRRAPGKQRELVAGISSDGSKVYADSVKGRFTISRDNAKNSVYLQMNSLRAEDTAVYYCYYYRTVSGSSMRYWGQGTLVTVSS

SEQ ID NO: 102 - protein, 119 aa, synthetic construct
  REGION 1..119: note = Synthetic Construct
EVQLVESGGGLVQPGGSLTLSCVASGSGSSINAMGWYRRAPGKQRELVAGISSDGSKVYSDSVKGRFTISRDNAKNSVYLQMNSLRAEDTAVYYCYYFRHVSGSSMRYWGQGTLVTVSS

SEQ ID NO: 103 - protein, 119 aa, synthetic construct
  REGION 1..119: note = Synthetic Construct
EVQLVESGGGLVQPGGSLTLSCVASGTTSSINAMGWYRRAPGKQRELVAGISSDGSKVYVDSVKGRFTISRDNAKNSVYLQMNSLRAEDTAVYYCYYFRFVSGSSMRYWGQGTLVTVSS

SEQ ID NO: 104 - protein, 119 aa, synthetic construct
  REGION 1..119: note = Synthetic Construct
EVQLVESGGGLVQPGGSLTLSCVASGSTSSINAMAWYRRAPGKQRELVAGISSDGSKVYVDSVKGRFTISRDNAKNSVYLQMNSLRAEDTAVYYCYYFRTVSGSSMRYWGQGTLVTVSS

SEQ ID NO: 105 - protein, 119 aa, synthetic construct
  REGION 1..119: note = Synthetic Construct
EVQLVESGGGLVQPGGSLTLSCVASGSTSRINAMGWYRRAPGKQRELVAGISSDGSKVYADSVKGRFTISRDNAKNSVYLQMNSLRAEDTAVYYCYYFRTKSGSSMRYWGQGTLVTVSS

SEQ ID NO: 106 - protein, 119 aa, synthetic construct
  REGION 1..119: note = Synthetic Construct
EVQLVESGGGLVQPGGSLTLSCVASGSTSRINAMGWYRRAPGKQRELVAGISSDGSKVYADSVKGRFTISRDNAKNSVYLQMNSLRAEDTAVYYCYYFRTVYGSSMRYWGQGTLVTVSS

SEQ ID NO: 107 - protein, 119 aa, synthetic construct
  REGION 1..119: note = Synthetic Construct
EVQLVESGGGLVQPGGSLTLSCVASGSTSSINAMGWYRRAPGKQRELVAGISSDGSKVYRDSVKGRFTISRDNAKNSVYLQMNSLRAEDTAVYYCYYFRTVSGSSMGYWGQGTLVTVSS

SEQ ID NO: 108 - protein, 119 aa, synthetic construct
  REGION 1..119: note = Synthetic Construct
EVQLVESGGGLVQPGGSLTLSCVASGSTSSINAMAWYRRAPGKQRELVAGISSDGSKVYSDSVKGRFTISRDNAKNSVYLQMNSLRAEDTAVYYCYYFRTVSGSSMRSWGQGTLVTVSS

SEQ ID NO: 109 - protein, 119 aa, synthetic construct
  REGION 1..119: note = Synthetic Construct
EVQLVESGGGLVQPGGSLTLSCVASGSTSSINAMAWYRRAPGKQRELVAGISSDNSKVYADSVKGRFTISRDNAKNSVYLQMNSLRAEDTAVYYCYYFRTVGGSSMRYWGQGTLVTVSS

SEQ ID NO: 110 - protein, 119 aa, synthetic construct
  REGION 1..119: note = Synthetic Construct
EVQLVESGGGLVQPGGSLTLSCVASGNTSSINAMAWYRRAPGKQRELVAGISSDGSKVYADSVKGRFTISRDNAKNSVYLQMNSLRAEDTAVYYCYYFRTVSGSSMRYWGQGTLVTVSS

SEQ ID NO: 111 - protein, 119 aa, synthetic construct
  REGION 1..119: note = Synthetic Construct
EVQLVESGGGLVQPGGSLTLSCVASGSTSSINAMAWYRRAPGKQRELVAGISSDGSKVYADSVKGRFTISRDNAKNSVYLQMNSLRAEDTAVYYCYYFRTVSGSHMRYWGQGTLVTVSS

SEQ ID NO: 112 - protein, 119 aa, synthetic construct
  REGION 1..119: note = Synthetic Construct
EVQLVESGGGLVQPGGSLTLSCVASGSTSIINAMGWYRRAPGKQRELVAGISSDGSKVYEDSVKGRFTISRDNAKNSVYLQMNSLRAEDTAVYYCYYFRAVSGSSMRYWGQGTLVTVSS

SEQ ID NO: 113 - protein, 119 aa, synthetic construct
  REGION 1..119: note = Synthetic Construct
EVQLVESGGGLVQPGGSLTLSCVASGSTSSINAMAWYRRAPGKQRELVAGISSDGSKVYADSVKGRFTISRDNAKNSVYLQMNSLRAEDTAVYYCYYFRTVSGSSMRYWGQGTLVTVSS

SEQ ID NO: 114 - protein, 119 aa, synthetic construct
  REGION 1..119: note = Synthetic Construct
EVQLVESGGGLVQPGGSLTLSCVASGSTSRINAMGWYRRAPGKQRELPAGISSDGSKVYAVSVKGRFTISRDNAKNSVYLQMNSLRAEDTAVYYCYYFRTVSGSPMRYWGQGTLVTVSS

SEQ ID NO: 115 - protein, 119 aa, synthetic construct
  REGION 1..119: note = Synthetic Construct
EVQLVESGGGLVQPGGSLTLSCVASGSTSRINAMGWYRRAPGKQRELVAGVSSDGSKVYADSVKGRFTISRDNAKNSVYLQMNSLRAEDTAVYYCYYFRTVSGSSMSYWGQGTLVTVSS

SEQ ID NO: 116 - protein, 119 aa, synthetic construct
  REGION 1..119: note = Synthetic Construct
EVQLVESGGGLVQPGGSLTLSCVASGTTSSINAMGWYRRAPGKQRELVAGISSDGSKVYEDSVKGRFTISRDNAKNSVYLQMNSLRAEDTAVYYCYYFRTVSGSSMRYWGQGTLVTVSS

SEQ ID NO: 117 - protein, 119 aa, synthetic construct
  REGION 1..119: note = Synthetic Construct
EVQLVESGGGLVQPGGSLTLSCVASGITSSINAMGWYRRAPGKQRELVAGISSDGSKVYAGSVKGRFTISRDNAKNSVYLQMNSLRAEDTAVYYCYYFRTVRGSSMRYWGQGTLVTVSS

SEQ ID NO: 118 - protein, 119 aa, synthetic construct
  REGION 1..119: note = Synthetic Construct
EVQLVESGGGLVQPGGSLTLSCVASGSTSDINAMGWYRRAPGKQRELVAGISSDKSKVYADSVKGRFTISRDNAKNSVYLQMNSLRAEDTAVYYCYYFRTVRGSSMRYWGQGTLVTVSS

SEQ ID NO: 119 - protein, 119 aa, synthetic construct
  REGION 1..119: note = Synthetic Construct
EVQLVESGGGLVQPGGSLTLSCVASGSTSSINAMAWYRRAPGKQRELVAGISSNGSKVYADSVKGRFTISRDNAKNSVYLQMNSLRAEDTAVYYCYYFRQVSGSSMRYWGQGTLVTVSS

SEQ ID NO: 120 - protein, 119 aa, synthetic construct
  REGION 1..119: note = Synthetic Construct
EVQLVESGGGLVQPGGSLTLSCVASGSTSSINAIGWYRRAPGKQRELVAGISSDGSKVLADSVKGRFTISRDNAKNSVYLQMNSLRAEDTAVYYCYYFRIVSGSSMGYWGQGTLVTVSS

SEQ ID NO: 121 - protein, 119 aa, synthetic construct
  REGION 1..119: note = Synthetic Construct
EVQLVESGGGLVQPGGSLTLSCVASGSTSSKNAMGWYRRAPGKQRELVAGISSDGSKVYADSVKGRFTISRDNAKNSVYLQMNSLRAEDTAVYYCYYFRTVSGASMRYWGQGTLVTVSS

SEQ ID NO: 122 - protein, 119 aa, synthetic construct
  REGION 1..119: note = Synthetic Construct
EVQLVESGGGLVQPGGSLTLSCVASGSTSSINAMGWYRRAPGKQRELVAGISSDNSKVYADSVKGRFTISRDNAKNSVYLQMNSLRAEDTAVYYCYYFRTVHGSSMRYWGQGTLVTVSS

SEQ ID NO: 123 - protein, 119 aa, synthetic construct
  REGION 1..119: note = Synthetic Construct
EVQLVESGGGLVQPGGSLTLSCVASGLTSSINAMGWYRRAPGKQRELVAGISSDGSKVYADSVKGRFTISRDNAKNSVYLQMNSLRAEDTAVYYCYYFRMVSGSSMRYWGQGTLVTVSS

SEQ ID NO: 124 - protein, 119 aa, synthetic construct
  REGION 1..119: note = Synthetic Construct
EVQLVESGGGLVQPGGSLTLSCVASGSTSSINAMAWYRRAPGKQRELVAGISSDGSKVYTDSVKGRFTISRDNAKNSVYLQMNSLRAEDTAVYYCYYFRTISGSSMRYWGQGTLVTVSS

SEQ ID NO: 125 - protein, 119 aa, synthetic construct
  REGION 1..119: note = Synthetic Construct
EVQLVESGGGLVQPGGSLTLSCVASGSTSSNNAMAWYRRAPGKQRELVAGISSDGSKVYTDSVKGRFTISRDNAKNSVYLQMNSLRAEDTAVYYCYYFRTRSGSSMRYWGQGTLVTVSS

SEQ ID NO: 126 - protein, 119 aa, synthetic construct
  REGION 1..119: note = Synthetic Construct
EVQLVESGGGLVQPGGSLTLSCVASGSTSSINAMAWYRRAPGKQRELVAGISSDNSKVYADSVKGRFTISRDNAKNSVYLQMNSLRAEDTAVYYCYYFRTVSGHSMRYWGQGTLVTVSS

SEQ ID NO: 127 - protein, 119 aa, synthetic construct
  REGION 1..119: note = Synthetic Construct
EVQLVESGGGLVQPGGSLTLSCVASGSTSHINAMGWYRRAPGKQRELVAGISSDGSRVYADSVKGRFTISRDNAKNSVYLQMNSLRAEDTAVYYCYYFRTVSGGSMRYWGQGTLVTVSS

SEQ ID NO: 128 - protein, 119 aa, synthetic construct
  REGION 1..119: note = Synthetic Construct
EVQLVESGGGLVQPGGSLTLSCVASGQTSSINAMGWYRRAPGKQRELVAGISSDGSQVYADSVKGRFTISRDNAKNSVYLQMNSLRAEDTAVYYCYYFRTKSGSSMRYWGQGTLVTVSS

SEQ ID NO: 129 - protein, 119 aa, synthetic construct
  REGION 1..119: note = Synthetic Construct
EVQLVESGGGLVQPGGSLTLSCVASGSTSRINGMGWYRRAPGKQRELPAGISSDGSKAYADSVKGRFTISRDNAKNSVYLQMNSLRAEDTAVYYCYYFRTASGTSMRYWGQGTLVTVSS

SEQ ID NO: 130 - protein, 119 aa, synthetic construct
  REGION 1..119: note = Synthetic Construct
EVQLVESGGGLVQPGGSLTLSCVASGSTSVINAMAWYRRAPGKQRELAAGISSDGSKVYAKSAKGRFTISRDNAKNSVYLQMNSLRAEDTAVYYCYYFNTVSGSSMRYWGQGTLVTVSS

SEQ ID NO: 131 - protein, 119 aa, synthetic construct
  REGION 1..119: note = Synthetic Construct
EVQLVESGGGLVQPGGSLTLSCVASGSTSSINAMAWYRRAPGKQRELVAGISSDGSKVYNDSVKGRFTISRDNAKNSVYLQMNSLRAEDTAVYYCYYFRTVRGSSQRYWGQGTLVTVSS

SEQ ID NO: 132 - protein, 119 aa, synthetic construct
  REGION 1..119: note = Synthetic Construct
EVQLVESGGGLVQPGGSLTLSCVASGKTSSINAMGWYRRAPGKQRELVAGISSDGSKVIADSVKGRFTISRDNAKNSVYLQMNSLRAEDTAVYYCYYFRTVLGSSMRYWGQGTLVTVSS

SEQ ID NO: 133 - protein, 119 aa, synthetic construct
  REGION 1..119: note = Synthetic Construct
EVQLVESGGGLVQPGGSLTLSCVASGSTSSINAMAWYRRAPGKQRELVAGISSDGSKVYTDSVKGRFTISRDNAKNSVYLQMNSLRAEDTAVYYCYYFRTRSGSSMRYWGQGTLVTVSS

SEQ ID NO: 134 - protein, 119 aa, synthetic construct
  REGION 1..119: note = Synthetic Construct
EVQLVESGGGLVQPGGSLTLSCVASGSVSSINAMGWYRRAPGKQRELVAGISSDGSKVYIDSVKGRFTISRDNAKNSVYLQMNSLRAEDTAVYYCYYFRTVSGLSMRYWGQGTLVTVSS

SEQ ID NO: 135 - protein, 119 aa, synthetic construct
  REGION 1..119: note = Synthetic Construct
EVQLVESGGGLVQPGGSLTLSCVASGNTSSINAMGWYRRAPGKQRELVAGISSDGSKVYYDSVKGRFTISRDNAKNSVYLQMNSLRAEDTAVYYCYYFRTVRGSSQRYWGQGTLVTVSS

SEQ ID NO: 136 - protein, 119 aa, synthetic construct
  REGION 1..119: note = Synthetic Construct
EVQLVESGGGLVQPGGSLTLSCVASGSTSSTNAMGWYRRAPGKQRELVAGISSDGSKVYVDSVKGRFTISRDNAKNSVYLQMNSLRAEDTAVYYCYYFRTVSGSSMVYWGQGTLVTVSS

SEQ ID NO: 137 - protein, 119 aa, synthetic construct
  REGION 1..119: note = Synthetic Construct
EVQLVESGGGLVQPGGSLTLSCVASGSTSSINAMGWYRRAPGKQRELVAGISSDGSKVYGDSVKGRFTISRDNAKNSVYLQMNSLRAEDTAVYYCYYFRTVSRSSMRYWGQGTLVTVSS

SEQ ID NO: 138 - protein, 119 aa, synthetic construct
  REGION 1..119: note = Synthetic Construct
EVQLVESGGGLVQPGGSLTLSCVASGSTSSINAMAWYRRAPGKQRELAAGISSDQSKVYADSAKGRFTISRDNAKNSVYLQMNSLRAEDTAVYYCYYFRTVSGSSMSYWGQGTLVTVSS

SEQ ID NO: 139 - protein, 119 aa, synthetic construct
  REGION 1..119: note = Synthetic Construct
EVQLVESGGGLVQPGGSLTLSCVASGGTSSINAMGWYRRAPGKQRELVAGISSDGSKVYSDSVKGRFTISRDNAKNSVYLQMNSLRAEDTAVYYCYYFRTVSGSSARYWGQGTLVTVSS

SEQ ID NO: 140 - protein, 119 aa, synthetic construct
  REGION 1..119: note = Synthetic Construct
EVQLVESGGGLVQPGGSLTLSCVASGSTRSINAMGWYRRAPGKQRELVAGISSDGSKVYADSVKGRFTISRDNAKNSVYLQMNSLRAEDTAVYYCYYFHTVSGSSMRYWGQGTLVTVSS

SEQ ID NO: 141 - protein, 119 aa, synthetic construct
  REGION 1..119: note = Synthetic Construct
EVQLVESGGGLVQPGGSLTLSCVASGTTSSINAMGWYRRAPGKQRELVAGISSDGSKVIADSVKGRFTISRDNAKNSVYLQMNSLRAEDTAVYYCYYFRTVLGSSMRYWGQGTLVTVSS

SEQ ID NO: 142 - protein, 119 aa, synthetic construct
  REGION 1..119: note = Synthetic Construct
EVQLVESGGGLVQPGGSLTLSCVASGSTSSINAMGWYRRAPGKQRELVAGISSDGSKVDADSVKGRFTISRDNAKNSVYLQMNSLRAEDTAVYYCYYFRTVSGSSMRYWGQGTLVTVSS

SEQ ID NO: 143 - protein, 119 aa, synthetic construct
  REGION 1..119: note = Synthetic Construct
EVQLVESGGGLVQPGGSLTLSCVASGSTSSINAMAWYRRAPGKQRELVAGISSDGSKVYKDSVKGRFTISRDNAKNSVYLQMNSLRAEDTAVYYCYYFRNVSGSSMRYWGQGTLVTVSS

SEQ ID NO: 144 - protein, 119 aa, synthetic construct
  REGION 1..119: note = Synthetic Construct
EVQLVESGGGLVQPGGSLTLSCVASGNTSSINAMGWYRRAPGKQRELVAGISSNGSKVYADSVKGRFTISRDNAKNSVYLQMNSLRAEDTAVYYCYYFRTVTGSSMRYWGQGTLVTVSS

SEQ ID NO: 145 - protein, 119 aa, synthetic construct
  REGION 1..119: note = Synthetic Construct
EVQLVESGGGLVQPGGSLTLSCVASGSTSRINAMGWYRRAPGKQRELVAGISSDGSKVYKDSVKGRFTISRDNAKNSVYLQMNSLRAEDTAVYYCYYFRTVSGSSMRYWGQGTLVTVSS

SEQ ID NO: 146 - protein, 119 aa, synthetic construct
  REGION 1..119: note = Synthetic Construct
EVQLVESGGGLVQPGGSLTLSCVASGSTSSINAIGWYRRAPGKQRELVAGISSDGSKVYADSVKGRFTISRDNAKNSVYLQMNSLRAEDTAVYYCYYFRTVKGSSMRYWGQGTLVTVSS

SEQ ID NO: 147 - protein, 119 aa, synthetic construct
  REGION 1..119: note = Synthetic Construct
EVQLVESGGGLVQPGGSLTLSCVASGLTSSINAMGWYRRAPGKQRELVAGISSDGSKVYQDSVKGRFTISRDNAKNSVYLQMNSLRAEDTAVYYCYYFRTNSGSSMRYWGQGTLVTVSS

SEQ ID NO: 148 - protein, 119 aa, synthetic construct
  REGION 1..119: note = Synthetic Construct
EVQLVESGGGLVQPGGSLTLSCVASGSTSSINAMAWYRRAPGKQRELVAGISSDGSKVYAESVKGRFTISRDNAKNSVYLQMNSLRAEDTAVYYCYYFRTVSGASMRYWGQGTLVTVSS

SEQ ID NO: 149 - protein, 119 aa, synthetic construct
  REGION 1..119: note = Synthetic Construct
EVQLVESGGGLVQPGGSLTLSCVASGSTSSTNAMGWYRRAPGKQRELVAGISSDGSKVLADSVKGRFTISRDNAKNSVYLQMNSLRAEDTAVYYCYYFRTVNLSSMRYWGQGTLVTVSS

SEQ ID NO: 150 - protein, 119 aa, synthetic construct
  REGION 1..119: note = Synthetic Construct
EVQLVESGGGLVQPGGSLTLSCVASGSTSSINAIGWYRRAPGKQRELVAGISSDGSKYYADSVKGRFTISRDNAKNSVYLQMNSLRAEDTAVYYCYYFRTVTGSSMRYWGQGTLVTVSS

SEQ ID NO: 151 - protein, 119 aa, synthetic construct
  REGION 1..119: note = Synthetic Construct
EVQLVESGGGLVQPGGSLTLSCVASGSTSSINAIGWYRRAPGKQRELVAGISSDGSKVYAVSVKGRFTISRDNAKNSVYLQMNSLRAEDTAVYYCYYFRKVSGSSARYWGQGTLVTVSS

SEQ ID NO: 152 - protein, 119 aa, synthetic construct
  REGION 1..119: note = Synthetic Construct
EVQLVESGGGLVQPGGSLTLSCVASGSTSSINAMGWYRRAPGKQRELVAGISSDGSKVVADSVKGRFTISRDNAKNSVYLQMNSLRAEDTAVYYCYYFRTYSGSSMRYWGQGTLVTVSS

SEQ ID NO: 153 - protein, 119 aa, synthetic construct
  REGION 1..119: note = Synthetic Construct
EVQLVESGGGLVQPGGSLTLSCVASGSTSSINAMGWYRRAPGKQRELVAGISSDGSKVYADSVKGRFTISRDNAKNSVYLQMNSLRAEDTAVYYCYYFRTVSKSSMRYWGQGTLVTVSS

SEQ ID NO: 154 - protein, 119 aa, synthetic construct
  REGION 1..119: note = Synthetic Construct
EVQLVESGGGLVQPGGSLTLSCVASGSTSSINAMAWYRRAPGKQRELVAGISSDGSKVYADSVKGRFTISRDNAKNSVYLQMNSLRAEDTAVYYCYYFKTVSGSSMRYWGQGTLVTVSS

SEQ ID NO: 155 - protein, 119 aa, synthetic construct
  REGION 1..119: note = Synthetic Construct
EVQLVESGGGLVQPGGSLTLSCVASGSTSSINAMAWYRRAPGKQRELAAGISSDNSKVYADSVKGRFTISRDNAKNSVYLQMNSLRAEDTAVYYCYYFRTRSGSSMRYWGQGTLVTVSS

SEQ ID NO: 156 - protein, 119 aa, synthetic construct
  REGION 1..119: note = Synthetic Construct
EVQLVESGGGLVQPGGSLTLSCVASGSKSSINAMGWYRRAPGKQRELAAGISSDGSKVYAQSVKGRFTISRDNAKNSVYLQMNSLRAEDTAVYYCYYFRTSSGSSMRYWGQGTLVTVSS

SEQ ID NO: 157 - protein, 119 aa, synthetic construct
  REGION 1..119: note = Synthetic Construct
EVQLVESGGGLVQPGGSLTLSCVASGTTSSINAMGWYRRAPGKQRELVAGISSDGSKVYVDSVKGRFTISRDNAKNSVYLQMNSLRAEDTAVYYCYYFRFLSGSSMRYWGQGTLVTVSS

SEQ ID NO: 158 - protein, 119 aa, synthetic construct
  REGION 1..119: note = Synthetic Construct
EVQLVESGGGLVQPGGSLTLSCVASGSTSSINAFGWYRRAPGKQRELVAGISSDGSKVYSDSVKGRFTISRDNAKNSVYLQMNSLRAEDTAVYYCYYFRTVSGSSMRYWGQGTLVTVSS

SEQ ID NO: 159 - protein, 119 aa, synthetic construct
  REGION 1..119: note = Synthetic Construct
EVQLVESGGGLVQPGGSLTLSCVASGSTFSINAMGWYRRAPGKQRELVAGISSDGSKVLADSVKGRFTISRDNAKNSVYLQMNSLRAEDTAVYYCYYFRLVSGSSMRYWGQGTLVTVSS

SEQ ID NO: 160 - protein, 119 aa, synthetic construct
  REGION 1..119: note = Synthetic Construct
EVQLVESGGGLVQPGGSLTLSCVASGSTRSINAMGWYRRAPGKQRELVAGISSDGSKVYNDSVKGRFTISRDNAKNSVYLQMNSLRAEDTAVYYCYYFRTVSGSSMRFWGQGTLVTVSS

SEQ ID NO: 161 - protein, 119 aa, synthetic construct
  REGION 1..119: note = Synthetic Construct
EVQLVESGGGLVQPGGSLTLSCVASGSTSSINAIGWYRRAPGKQRELVAGISSDGSKVYNDSVKGRFTISRDNAKNSVYLQMNSLRAEDTAVYYCYYFRTQSGSSMRYWGQGTLVTVSS

SEQ ID NO: 162 - protein, 119 aa, synthetic construct
  REGION 1..119: note = Synthetic Construct
EVQLVESGGGLVQPGGSLTLSCVASGSTSSINAMGWYRRAPGKQRELVAGISSDGSKVYVDSVKGRFTISRDNAKNSVYLQMNSLRAEDTAVYYCYYFRTVSGSSMPYWGQGTLVTVSS

SEQ ID NO: 163 - protein, 119 aa, synthetic construct
  REGION 1..119: note = Synthetic Construct
EVQLVESGGGLVQPGGSLTLSCVASGSTSSINAMGWYRRAPGKQRELVAGISSDGSKVVADSVKGRFTISRDNAKNSVYLQMNSLRAEDTAVYYCYYFRTLSGSSMRYWGQGTLVTVSS

SEQ ID NO: 164 - protein, 119 aa, synthetic construct
  REGION 1..119: note = Synthetic Construct
EVQLVESGGGLVQPGGSLTLSCVASGTTSSINAMGWYRRAPGKQRELVAGISSDGSKVYGDSVKGRFTISRDNAKNSVYLQMNSLRAEDTAVYYCYYFRTVSGSAMRYWGQGTLVTVSS

SEQ ID NO: 165 - protein, 119 aa, synthetic construct
  REGION 1..119: note = Synthetic Construct
EVQLVESGGGLVQPGGSLTLSCVASGSTSSINAMAWYRRAPGKQRELVAGISSDGSKVYTDSVKGRFTISRDNAKNSVYLQMNSLRAEDTAVYYCYYFRTTSGSSMRYWGQGTLVTVSS

SEQ ID NO: 166 - protein, 119 aa, synthetic construct
  REGION 1..119: note = Synthetic Construct
EVQLVESGGGLVQPGGSLTLSCVASGRTSSINAMGWYRRAPGKQRELVAGISSDGSKVYNDSVKGRFTISRDNAKNSVYLQMNSLRAEDTAVYYCYYFRTVSGTSMRYWGQGTLVTVSS

SEQ ID NO: 167 - protein, 119 aa, synthetic construct
  REGION 1..119: note = Synthetic Construct
EVQLVESGGGLVQPGGSLTLSCVASGSTSSRNAMGWYRRAPGKQRELVAGISSDGSKVTADSVKGRFTISRDNAKNSVYLQMNSLRAEDTAVYYCYYFRTRSGSSMRYWGQGTLVTVSS

SEQ ID NO: 168 - protein, 119 aa, synthetic construct
  REGION 1..119: note = Synthetic Construct
EVQLVESGGGLVQPGGSLTLSCVASGSTKSINAMGWYRRAPGKQRELVAGISSDGSKVYRDSVKGRFTISRDNAKNSVYLQMNSLRAEDTAVYYCYYFRTSSGSSMRYWGQGTLVTVSS

SEQ ID NO: 169 - protein, 119 aa, synthetic construct
  REGION 1..119: note = Synthetic Construct
EVQLVESGGGLVQPGGSLTLSCVASGSTSSRNAMGWYRRAPGKQRELVAGISSNGSKVYSDSVKGRFTISRDNAKNSVYLQMNSLRAEDTAVYYCYYFRTVSGSSMSYWGQGTLVTVSS

SEQ ID NO: 170 - protein, 119 aa, synthetic construct
  REGION 1..119: note = Synthetic Construct
EVQLVESGGGLVQPGGSLTLSCVASGSTSSINAIGWYRRAPGKQRELVAGISSDGSKVYSDSVKGRFTISRDNAKNSVYLQMNSLRAEDTAVYYCYYFRPVSGSSMRYWGQGTLVTVSS

SEQ ID NO: 171 - protein, 119 aa, synthetic construct
  REGION 1..119: note = Synthetic Construct
EVQLVESGGGLVQPGGSLTLSCVASGSTSLINAMGWYRRAPGKQRELVAGISSDGSKVYADSVKGRFTISRDNAKNSVYLQMNSLRAEDTAVYYCYYFRHVSGSSMRYWGQGTLVTVSS

SEQ ID NO: 172 - protein, 119 aa, synthetic construct
  REGION 1..119: note = Synthetic Construct
EVQLVESGGGLVQPGGSLTLSCVASGSTSSINAMAWYRRAPGKQRELVAGISSDGSKVYADSVKGRFTISRDNAKNSVYLQMNSLRAEDTAVYYCYYFRTKSGSSMRYWGQGTLVTVSS

SEQ ID NO: 173 - protein, 119 aa, synthetic construct
  REGION 1..119: note = Synthetic Construct
EVQLVESGGGLVQPGGSLTLSCVASGSTSSINAMGWYRRAPGKQRELVAGISSDGSLVYADSVKGRFTISRDNAKNSVYLQMNSLRAEDTAVYYCYYFTTVSGSSMRYWGQGTLVTVSS

SEQ ID NO: 174 - protein, 119 aa, synthetic construct
  REGION 1..119: note = Synthetic Construct
EVQLVESGGGLVQPGGSLTLSCVASGTTSSINAMGWYRRAPGKQRELVAGISSDGTKVYADSVKGRFTISRDNAKNSVYLQMNSLRAEDTAVYYCYYFHTVSGSSMRYWGQGTLVTVSS

SEQ ID NO: 175 - protein, 119 aa, synthetic construct
  REGION 1..119: note = Synthetic Construct
EVQLVESGGGLVQPGGSLTLSCVASGSTSSINAFGWYRRAPGKQRELVAGISSDGSKVYADSVKGRFTISRDNAKNSVYLQMNSLRAEDTAVYYCYYFRTVRGSSMRYWGQGTLVTVSS

SEQ ID NO: 176 - protein, 119 aa, synthetic construct
  REGION 1..119: note = Synthetic Construct
EVQLVESGGGLVQPGGSLTLSCVASGSTSSRNAMGWYRRAPGKQRELVAGISSDGSKLYLDSVKGRFTISRDNAKNSVYLQMNSLRAEDTAVYYCYYFRTVLGSSMRYWGQGTLVTVSS

SEQ ID NO: 177 - protein, 119 aa, synthetic construct
  REGION 1..119: note = Synthetic Construct
EVQLVESGGGLVQPGGSLTLSCVASGNTSSINAMGWYRRAPGKQRELVAGISSDGSRVYADSVKGRFTISRDNAKNSVYLQMNSLRAEDTAVYYCYYFRTVSGSSMRSWGQGTLVTVSS

SEQ ID NO: 178 - protein, 119 aa, synthetic construct
  REGION 1..119: note = Synthetic Construct
EVQLVESGGGLVQPGGSLTLSCVASGTTSSINAMGWYRRAPGKQRELVAGISSDGSKVYNDSVKGRFTISRDNAKNSVYLQMNSLRAEDTAVYYCYYFRTVRGSSMRYWGQGTLVTVSS

SEQ ID NO: 179 - protein, 119 aa, synthetic construct
  REGION 1..119: note = Synthetic Construct
EVQLVESGGGLVQPGGSLTLSCVASGSTASINAMGWYRRAPGKQRELVAGISSDGSKVYADSVKGRFTISRDNAKNSVYLQMNSLRAEDTAVYYCYYFRYVSGSSMRYWGQGTLVTVSS

SEQ ID NO: 180 - protein, 119 aa, synthetic construct
  REGION 1..119: note = Synthetic Construct
EVQLVESGGGLVQPGGSLTLSCVASGSTSSINAVGWYRRAPGKQRELVAGISSDGSKVYVDSVKGRFTISRDNAKNSVYLQMNSLRAEDTAVYYCYYFRTVYGSSMRYWGQGTLVTVSS

SEQ ID NO: 181 - protein, 119 aa, synthetic construct
  REGION 1..119: note = Synthetic Construct
EVQLVESGGGLVQPGGSLTLSCVASGSTSSRNAMGWYRRAPGKQRELVAGISSDGSKLYADSVKGRFTISRDNAKNSVYLQMNSLRAEDTAVYYCYYFRTVLGSSMRYWGQGTLVTVSS

SEQ ID NO: 182 - protein, 119 aa, synthetic construct
  REGION 1..119: note = Synthetic Construct
EVQLVESGGGLVQPGGSLTLSCVASGSTNSINAMGWYRRAPGKQRELVAGISSDGSKVYKDSVKGRFTISRDNAKNSVYLQMNSLRAEDTAVYYCYYYRTVSGSSMRYWGQGTLVTVSS

SEQ ID NO: 183 - protein, 119 aa, synthetic construct
  REGION 1..119: note = Synthetic Construct
EVQLVESGGGLVQPGGSLTLSCVASGSTSSINAMAWYRRAPGKQRELVAGISSDGSKVYADSVKGRFTISRDNAKNSVYLQMNSLRAEDTAVYYCYYFRSVSGSSMRYWGQGTLVTVSS

SEQ ID NO: 184 - protein, 119 aa, synthetic construct
  REGION 1..119: note = Synthetic Construct
EVQLVESGGGLVQPGGSLTLSCVASGSTSRINAMGWYRRAPGKQRELVAGISSDGSKVYQDSVKGRFTISRDNAKNSVYLQMNSLRAEDTAVYYCYYFRRVSGSSMRYWGQGTLVTVSS

SEQ ID NO: 185 - protein, 119 aa, synthetic construct
  REGION 1..119: note = Synthetic Construct
EVQLVESGGGLVQPGGSLTLSCVPSGSTSNINAMGWYRRAPGKQRELPAGISSDGTKIYADSAKVPFTITRDNAKNSVYLQMNSLRAEDTAVYYCYYFRTVSGTSMRYWGQGTLVTVSS

SEQ ID NO: 186 - protein, 119 aa, synthetic construct
  REGION 1..119: note = Synthetic Construct
EVQLVESGGGLVQPGGSLTLSCVASGSTSKINAMGWYRRAPGKQRELVAGISSDRSKVYADSVKGRFTISRDNAKNSVYLQMNSLRAEDTAVYYCYYFRTVAGSSMRYWGQGTLVTVSS

SEQ ID NO: 187 - protein, 119 aa, synthetic construct
  REGION 1..119: note = Synthetic Construct
EVQLVESGGGLVQPGGSLTLSCVASGSTSSINALGWYRRAPGKQRELVAGISSDGSLVYADSVKGRFTISRDNAKNSVYLQMNSLRAEDTAVYYCYYFRIVSGSSMRYWGQGTLVTVSS

SEQ ID NO: 188 - protein, 119 aa, synthetic construct
  REGION 1..119: note = Synthetic Construct
EVQLVESGGGLVQPGGSLTLSCVASGKTSSINAMGWYRRAPGKQRELVAGISSDGSKVYADSVKGRFTISRDNAKNSVYLQMNSLRAEDTAVYYCYYFRTVSGVSMRYWGQGTLVTVSS

SEQ ID NO: 189 - protein, 119 aa, synthetic construct
  REGION 1..119: note = Synthetic Construct
EVQLVESGGGLVQPGGSLTLSCVASGSTSSINAVGWYRRAPGKQRELVAGISSDGSKVYRDSVKGRFTISRDNAKNSVYLQMNSLRAEDTAVYYCYYFRTVQGSSMRYWGQGTLVTVSS

SEQ ID NO: 190 - protein, 119 aa, synthetic construct
  REGION 1..119: note = Synthetic Construct
EVQLVESGGGLVQPGGSLTLSCVASGSTSRINAMGWYRRAPGKQRELVAGISSDGSKVYADSVKGRFTISRDNAKNSVYLQMNSLRAEDTAVYYCYYFRTASGSSMRYWGQGTLVTVSS

SEQ ID NO: 191 - protein, 119 aa, synthetic construct
  REGION 1..119: note = Synthetic Construct
EVQLVESGGGLVQPGGSLTLSCVASGSTSSINAMGWYRRAPGKQRELVAGISSDGSKVYSDSVKGRFTISRDNAKNSVYLQMNSLRAEDTAVYYCYYFRTVSGSSSRYWGQGTLVTVSS

SEQ ID NO: 192 - protein, 119 aa, synthetic construct
  REGION 1..119: note = Synthetic Construct
EVQLVESGGGLVQPGGSLTLSCVASGSTSSINAVGWYRRAPGKQRELVAGISSDGTKVYRDSVKGRFTISRDNAKNSVYLQMNSLRAEDTAVYYCYYFRTVQGSSMRYWGQGTLVTVSS

SEQ ID NO: 193 - protein, 119 aa, synthetic construct
  REGION 1..119: note = Synthetic Construct
EVQLVESGGGLVQPGGSLTLSCVASGTTSSINAMGWYRRAPGKQRELAAGISSDGSKVYNDSVKGRFTISRDNAKNSVYLQMNSLRAEDTAVYYCYYFRTVRGSSMRYWGQGTLVTVSS

SEQ ID NO: 194 - protein, 119 aa, synthetic construct
  REGION 1..119: note = Synthetic Construct
EVQLVESGGGLVQPGGSLTLSCVASGSTSSINAMGWYRRAPGKQRELVAGISSDGSKVYADSVKGRFTISRDNAKNSVYLQMNSLRAEDTAVYYCYYFRTKSGSSMRYWGQGTLVTVSS

SEQ ID NO: 195 - protein, 119 aa, synthetic construct
  REGION 1..119: note = Synthetic Construct
EVQLVESGGGLVQPGGSLTLSCVASGTTSSINAMGWYRRAPGKQRELVAGISSDGSKVYADSVKGRFTISRDNAKNSVYLQMNSLRAEDTAVYYCYYFRTVWGSSMRYWGQGTLVTVSS

SEQ ID NO: 196 - protein, 119 aa, synthetic construct
  REGION 1..119: note = Synthetic Construct
EVQLVESGGGLVQPGGSLTLSCVASGKTSSINAMGWYRRAPGKQRELVAGISSDGSKVYTDSVKGRFTISRDNAKNSVYLQMNSLRAEDTAVYYCYYFRTRSGSSMRYWGQGTLVTVSS

SEQ ID NO: 197 - protein, 119 aa, synthetic construct
  REGION 1..119: note = Synthetic Construct
EVQLVESGGGLVQPGGSLTLSCVASGSTSSINAMGWYRRAPFKQGELPAGISPDGTKAYADSAKVRFTISRDNAKNSVYLQMNSLRAEDTAVYYCYYFHTVCGTSMGYWGQGTLVTVSS

SEQ ID NO: 198 - protein, 119 aa, synthetic construct
  REGION 1..119: note = Synthetic Construct
EVQLVESGGGLVQPGGSLTLSCVASGSTSAINAMGWYRRAPGKQRELVAGISSDGSKVYVDSVKGRFTISRDNAKNSVYLQMNSLRAEDTAVYYCYYFRTVSGSSQRYWGQGTLVTVSS

SEQ ID NO: 199 - protein, 119 aa, synthetic construct
  REGION 1..119: note = Synthetic Construct
EVQLVESGGGLVQPGGSLTLSCVASGSPSSINAYGWYRRAPGKQRELVAGISSDGSKVYSDSVKGRFTISRDNAKNSVYLQMNSLRAEDTAVYYCYYFRTVSGSSMSYWGQGTLVTVSS

SEQ ID NO: 200 - protein, 119 aa, synthetic construct
  REGION 1..119: note = Synthetic Construct
EVQLVESGGGLVQPGGSLTLSCVASGSTSSINAMGWYRRAPGKQRELVAGISSDGSKVYASSVKGRFTISRDNAKNSVYLQMNSLRAEDTAVYYCYYFRTVRGSSMRYWGQGTLVTVSS

SEQ ID NO: 201 - protein, 119 aa, synthetic construct
  REGION 1..119: note = Synthetic Construct
EVQLVESGGGLVQPGGSLTLSCVASGSRSSINAMGWYRRAPGKQRELVAGISADGSKVYADSVKGRFTISRDNAKNSVYLQMNSLRAEDTAVYYCYYFRTQSGSSMRYWGQGTLVTVSS

SEQ ID NO: 202 - protein, 119 aa, synthetic construct
  REGION 1..119: note = Synthetic Construct
EVQLVESGGGLVQPGGSLTLSCVASGSVSSINAMGWYRRAPGKQRELVAGISSDGSKVYASSAKGRFTISRDNAKNSVYLQMNSLRAEDTAVYYCYYFRTLSGSSMRYWGQGTLVTVSS

SEQ ID NO: 203 - protein, 119 aa, synthetic construct
  REGION 1..119: note = Synthetic Construct
EVQLVESGGGLVQPGGSLTLSCVASGSTSSINAMAWYRRAPGKQRELVAGISSDGSKVYADSVKGRFTISRDNAKNSVYLQMNSLRAEDTAVYYCYYFHTVSGSSMRYWGQGTLVTVSS

SEQ ID NO: 204 - protein, 119 aa, synthetic construct
  REGION 1..119: note = Synthetic Construct
EVQLVESGGGLVQPGGSLTLSCVASGSTSSINAIGWYRRAPGKQRELVAGISSDGSSVYADSVKGRFTISRDNAKNSVYLQMNSLRAEDTAVYYCYYFRRVSGSSMRYWGQGTLVTVSS

SEQ ID NO: 205 - protein, 119 aa, synthetic construct
  REGION 1..119: note = Synthetic Construct
EVQLVESGGGLVQPGGSLTLSCVASGSTSSINAMGWYRRAPGKQRELVAGISSDGSKVYSDSVKGRFTISRDNAKNSVYLQMNSLRAEDTAVYYCYYFRLVSGSSMRYWGQGTLVTVSS

SEQ ID NO: 206 - protein, 119 aa, synthetic construct
  REGION 1..119: note = Synthetic Construct
EVQLVESGGGLVQPGGSLTLSCVASGSTSSINAVGWYRRAPGKQRELVAGISSDGSKVYAGSVKGRFTISRDNAKNSVYLQMNSLRAEDTAVYYCYYFRTVSGSYMRYWGQGTLVTVSS

SEQ ID NO: 207 - protein, 119 aa, synthetic construct
  REGION 1..119: note = Synthetic Construct
EVQLVESGGGLVQPGGSLTLSCVASGSTSSINAMAWYRRAPGKQRELAAGISSDNSKVYADSVKGRFTISRDNAKNSVYLQMNSLRAEDTAVYYCYYFRTVGGSSMRYWGQGTLVTVSS

SEQ ID NO: 208 - protein, 119 aa, synthetic construct
  REGION 1..119: note = Synthetic Construct
EVQLVESGGGLVQPGGSLTLSCVASGSTSSINAYGWYRRAPGKQRELVAGISSDGSAVYADSVKGRFTISRDNAKNSVYLQMNSLRAEDTAVYYCYYFRTHSGSSMRYWGQGTLVTVSS

SEQ ID NO: 209 - protein, 119 aa, synthetic construct
  REGION 1..119: note = Synthetic Construct
EVQLVESGGGLVQPGGSLTLSCVASGSTSSINAVGWYRRAPGKQRELVAGISSDGSSVYADSVKGRFTISRDNAKNSVYLQMNSLRAEDTAVYYCYYFRTVSTSSMRYWGQGTLVTVSS

SEQ ID NO: 210 - protein, 119 aa, synthetic construct
  REGION 1..119: note = Synthetic Construct
EVQLVESGGGLVQPGGSLTLSCVASGSKSSINAMGWYRRAPGKQRELPAGISSNGTKVYADSAKVRFTISRDNAKNSVYLQMNSLRAEDTAVYYCYYFRTVLGTSMRYWGQGTLVTVSS

SEQ ID NO: 211 - protein, 119 aa, synthetic construct
  REGION 1..119: note = Synthetic Construct
EVQLVESGGGLVQPGGSLTLSCVASGSTSSINAMAWYRRAPGKQRELVAGISSDGSKLYADSVKGRFTISRDNAKNSVYLQMNSLRAEDTAVYYCYYFRTVSGSSMRYWGQGTLVTVSS

SEQ ID NO: 212 - protein, 119 aa, synthetic construct
  REGION 1..119: note = Synthetic Construct
EVQLVESGGGLVQPGGSLTLSCVASGSVSSINAMGWYRRAPGKQRELVAGISSDGSKVYKDSVKGRFTISRDNAKNSVYLQMNSLRAEDTAVYYCYYFRTVSGSSMGYWGQGTLVTVSS

SEQ ID NO: 213 - protein, 119 aa, synthetic construct
  REGION 1..119: note = Synthetic Construct
EVQLVESGGGLVQPGGSLTLSCVASGSTSSINAMGWYRRAPGKQRELVAGISSDGSLVYADSVKGRFTISRDNAKNSVYLQMNSLRAEDTAVYYCYYFRTVSGSSMRAWGQGTLVTVSS

SEQ ID NO: 214 - protein, 119 aa, synthetic construct
  REGION 1..119: note = Synthetic Construct
EVQLVESGGGLVQPGGSLTLSCVASGSTSSINAMGWYRRAPGKQRELVAGISSDGSLVYADSVKGRFTISRDNAKNSVYLQMNSLRAEDTAVYYCYYFRILSGSSMRYWGQGTLVTVSS

SEQ ID NO: 215 - protein, 119 aa, synthetic construct
  REGION 1..119: note = Synthetic Construct
EVQLVESGGGLVQPGGSLTLSCVASGSTSSINAMAWYRRAPGKQRELVAGISSDGSKVYADSVKGRFTISRDNAKNSVYLQMNSLRAEDTAVYYCYYFRTVQGSSMRYWGQGTLVTVSS

SEQ ID NO: 216 - protein, 119 aa, synthetic construct
  REGION 1..119: note = Synthetic Construct
EVQLVESGGGLVQPGGSLTLSCVASGSTSYINAMGWYRRAPGKQRELVAGISSDGSKVYADSVKGRFTISRDNAKNSVYLQMNSLRAEDTAVYYCYYFRTVSGQSMGYWGQGTLVTVSS

SEQ ID NO: 217 - protein, 119 aa, synthetic construct
  REGION 1..119: note = Synthetic Construct
EVQLVESGGGLVQPGGSLTLSCVASGSTSSINAMGWYRRAPGKQRELVAGVSSDGSKVYADSVKGRFTISRDNAKNSVYLQMNSLRAEDTAVYYCYYFRTVSGSSARYWGQGTLVTVSS

SEQ ID NO: 218 - protein, 119 aa, synthetic construct
  REGION 1..119: note = Synthetic Construct
EVQLVESGGGLVQPGGSLTLSCVASGSTSSINAMGWYRRAPGKQRELPAGISRDGSKVYADSVKGRFTISRDNAKNSVYLQMNSLRAEDTAVYYCYYFRYVSGSSMRYWGQGTLVTVSS

SEQ ID NO: 219 - protein, 119 aa, synthetic construct
  REGION 1..119: note = Synthetic Construct
EVQLVESGGGLVQPGGSLTLSCVASGSTSSINAMGWYRRAPGKQRELAAGISSDGSKLYADSVKGRFTISRDNAKNSVYLQMNSLRAEDTAVYYCYYFRTVSGSSMRYWGQGTLVTVSS

SEQ ID NO: 220 - protein, 119 aa, synthetic construct
  REGION 1..119: note = Synthetic Construct
EVQLVESGGGLVQPGGSLTLSCVASGSTSRINAMGWYRRAPGKQRELVAGISSDGSKVYADSVKGRFTISRDNAKNSVYLQMNSLRAEDTAVYYCYYFRRVSGSSMRYWGQGTLVTVSS

SEQ ID NO: 221 - protein, 119 aa, synthetic construct
  REGION 1..119: note = Synthetic Construct
EVQLVESGGGLVQPGGSLTLSCVASGSTSSINAMAWYRRAPGKQRELAAGISSDGSKVYADSVKGRFTISRDNAKNSVYLQMNSLRAEDTAVYYCYYFHTVSGSSMRYWGQGTLVTVSS

SEQ ID NO: 222 - protein, 119 aa, synthetic construct
  REGION 1..119: note = Synthetic Construct
EVQLVESGGGLVQPGGSLTLSCVASGSTSSINAMAWYRRAPGKQRELVAGISSDGSKVYADSVKGRFTISRDNAKNSVYLQMNSLRAEDTAVYYCYYFRQVSGSSMRYWGQGTLVTVSS

SEQ ID NO: 223 - protein, 119 aa, synthetic construct
  REGION 1..119: note = Synthetic Construct
EVQLVESGGGLVQPGGSLTLSCVASGSTSSINAMGWYRRAPGKQRELVAGISSDTSKVYADSVKGRFTISRDNAKNSVYLQMNSLRAEDTAVYYCYYFRTVSGSYMRYWGQGTLVTVSS

SEQ ID NO: 224 - protein, 119 aa, synthetic construct
  REGION 1..119: note = Synthetic Construct
EVQLVESGGGLVQPGGSLTLSCVASGSTSTINAMGWYRRAPGKQRELVAGISSDGSKVYADSVKGRFTISRDNAKNSVYLQMNSLRAEDTAVYYCYYFRTASGSSMRYWGQGTLVTVSS

SEQ ID NO: 225 - protein, 119 aa, synthetic construct
  REGION 1..119: note = Synthetic Construct
EVQLVESGGGLVQPGGSLTLSCVASGSTSSINAVGWYRRAPGKQRELVAGISSDGSTVYADSVKGRFTISRDNAKNSVYLQMNSLRAEDTAVYYCYYFRTVSGHSMRYWGQGTLVTVSS

SEQ ID NO: 226 - protein, 119 aa, synthetic construct
  REGION 1..119: note = Synthetic Construct
EVQLVESGGGLVQPGGSLTLSCVASGSTSSINAMGWYRRAPGKQRELAAGISKDGSKVYADSAKGRFTISRDNAKNSVYLQMNSLRAEDTAVYYCYYFRTVSGSSSRYWGQGTLVTVSS

SEQ ID NO: 227 - protein, 119 aa, synthetic construct
  REGION 1..119: note = Synthetic Construct
EVQLVESGGGLVQPGGSLTLSCVASGSPSSINAYGWYRRAPGKQRELVAGISSDGSKVYSDSVKGRFTISRDNAKNSVYLQMNSLRAEDTAVYYCYYFRTVSGSSYSYWGQGTLVTVSS

SEQ ID NO: 228 - protein, 119 aa, synthetic construct
  REGION 1..119: note = Synthetic Construct
EVQLVESGGGLVQPGGSLTLSCVASGSPSSINAYGWYRRAPGKQRELVAGISSDGSKVYSDSVKGRFTISRDNAKNSVYLQMNSLRAEDTAVYYCYYFRTVSGSSQSYWGQGTLVTVSS

SEQ ID NO: 229 - protein, 117 aa, synthetic construct
  REGION 1..117: note = Synthetic Construct
EVQLVESGGGLVQPGGSLTLSCAASGSSVKFLSMAWYRQAPGKKRELVAGISADGSTDYIDSVKGRFTISRDNAKNSVYLQMNSLRAEDTAVYYCYAYRWTRRYTYWGQGTLVTVSS

SEQ ID NO: 230 - protein, 117 aa, synthetic construct
  REGION 1..117: note = Synthetic Construct
EVQLVESGGGLVQPGGSLTLSCAASGSSVSFLSLAWYRQAPGKKRELVAGISADGSTAYIDSVKGRFTISRDNAKNSVYLQMNSLRAEDTAVYYCYAYRWRTRYTYWGQGTLVTVSS

SEQ ID NO: 231 - protein, 117 aa, synthetic construct
  REGION 1..117: note = Synthetic Construct
EVQLVESGGGLVQPGGSLTLSCAASGSRVSFLSMAWYRQAPGKKRELVAGISRDGSTDYIDSVKGRFTISRDNAKNSVYLQMNSLRAEDTAVYYCYAYRWTTRRTYWGQGTLVTVSS

SEQ ID NO: 232 - protein, 117 aa, synthetic construct
  REGION 1..117: note = Synthetic Construct
EVQLVESGGGLVQPGGSLTLSCAASGSQVSFLSMAWYRQAPGKKRELVAGISRDGSTDYIDSVKGRFTISRDNAKNSVYLQMNSLRAEDTAVYYCYAYRWTTRYIYWGQGTLVTVSS

SEQ ID NO: 233 - protein, 117 aa, synthetic construct
  REGION 1..117: note = Synthetic Construct
EVQLVESGGGLVQPGGSLTLSCAASGSSVSFLSMAWYRQAPGKKRELVAGISEAGSTDYIDSVKGRFTISRDNAKNSVYLQMNSLRAEDTAVYYCYAYRWRTRYTYWGQGTLVTVSS

SEQ ID NO: 234 - protein, 117 aa, synthetic construct
  REGION 1..117: note = Synthetic Construct
EVQLVESGGGLVQPGGSLTLRCAASGSKVSFLSMAWYRQAPGKKRELVAGISADGSTDYVDSVKGRFTISRDNAKNSVYLQMNSLRAEDTAVYYCYAYRWTRRYTYWGQGTLVTVSS

SEQ ID NO: 235 - protein, 117 aa, synthetic construct
  REGION 1..117: note = Synthetic Construct
EVQLVESGGGLVQPGGSLTLSCAASGSSVGFLSMAWYRQAPGKKRELVAGISADGSTDYIRSVKGRFTISRDNAKNSVYLQMNSLRAEDTAVYYCYAYRWRTRYTYWGQGTLVTVSS

SEQ ID NO: 236 - protein, 117 aa, synthetic construct
  REGION 1..117: note = Synthetic Construct
EVQLVESGGGLVQPGGSLTLSCAASGSSVSFLSMAWYRQAPGKKRELVAGISADGSVDYIDSVKGRFTISRDNAKNSVYLQMNSLRAEDTAVYYCYAYRWTTRYIYWGQGTLVTVSS

SEQ ID NO: 237 - protein, 117 aa, synthetic construct
  REGION 1..117: note = Synthetic Construct
EVQLVESGGGLVQPGGSLTLSCAASGSRVSFLSMAWYRQAPGKKRELVAGISADGSTLYIDSVKGRFTISRDNAKNSVYLQMNSLRAEDTAVYYCYAYRWTTRRTYWGQGTLVTVSS

SEQ ID NO: 238 - protein, 117 aa, synthetic construct
  REGION 1..117: note = Synthetic Construct
EVQLVESGGGLVQPGGSLTLSCAASGSSVSFLSLAWYRQAPGKKRELVAGISTDGSTDYIDSVKGRFTISRDNAKNSVYLQMNSLRAEDTAVYYCYAYRWRTRYTYWGQGTLVTVSS

SEQ ID NO: 239 - protein, 117 aa, synthetic construct
  REGION 1..117: note = Synthetic Construct
EVQLVESGGGLVQPGGSLTLSCAASGSSVSFLSMAWYRQAPGKKRELVAGISGDGSTDYIDSVKGRFTISRDNAKNSVYLQMNSLRAEDTAVYYCYAYRWTTRYTYWGQGTLVTVSS

SEQ ID NO: 240 - protein, 117 aa, synthetic construct
  REGION 1..117: note = Synthetic Construct
EVQLVESGGGLVQPGGSLTLSCAASGSSVQFLSMAWYRQAPGKKRELVAGISADGSTDYINSVKGRFTISRDNAKNSVYLQMNSLRAEDTAVYYCYAYRWRTRYTYWGQGTLVTVSS

SEQ ID NO: 241 - protein, 117 aa, synthetic construct
  REGION 1..117: note = Synthetic Construct
EVQLVESGGGLVQPGGSLTLSCAASGSNVSFLSMAWYRQAPGKKRELVAGISARGSTDYIDSVKGRFTISRDNAKNSVYLQMNSLRAEDTAVYYCYAYHWTTRYTYWGQGTLVTVSS

SEQ ID NO: 242 - protein, 117 aa, synthetic construct
  REGION 1..117: note = Synthetic Construct
EVQLVESGGGLVQPGGSLTLSCVASGSSVKFLSMAWYRQAPGKKRELVAGISADGSTTYIDSVKGRFTISRDNAKNSVYLQMNSLRAEDTAVYYCYAYRWTTRRTYWGQGTLVTVSS

SEQ ID NO: 243 - protein, 117 aa, synthetic construct
  REGION 1..117: note = Synthetic Construct
EVQLVESGGGLVQPGGSLTLSCAASGKSVSFLSMAWYRQAPGKKRELVAGISKDGSTDYIDSVKGRFTISRDNAKNSVYLQMNSLRAEDTAVYYCYAYRWTTRYTYWGQGTLVTVSS

SEQ ID NO: 244 - protein, 117 aa, synthetic construct
  REGION 1..117: note = Synthetic Construct
EVQLVESGGGLVQPGGSLTLSCAASGSRVSFLSMAWYRQAPGKKRELVAGISADGSTTYIDSVKGRFTISRDNAKNSVYLQMNSLRAEDTAVYYCYAYRWTTRYTYWGQGTLVTVSS

SEQ ID NO: 245 - protein, 117 aa, synthetic construct
  REGION 1..117: note = Synthetic Construct
EVQLVESGGGLVQPGGSLTLSCAASGSHVSFLSMAWYRQAPGKKRELVAGISANGSTDYIDSVKGRFTISRDNAKNSVYLQMNSLRAEDTAVYYCYAYRWTTRYAYWGQGTLVTVSS

SEQ ID NO: 246 - protein, 117 aa, synthetic construct
  REGION 1..117: note = Synthetic Construct
EVQLVESGGGLVQPGGSLTLSCAASGSSVSFLSMAWYRQAPGKKRELVAGISRDGSTDYIDSVKGRFTISRDNAKNSVYLQMNSLRAEDTAVYYCYAYRWVTRYTYWGQGTLVTVSS

SEQ ID NO: 247 - protein, 117 aa, synthetic construct
  REGION 1..117: note = Synthetic Construct
EVQLVESGGGLVQPGGSLTLSCAASGSSVSFLSMAWYRQAPGKKRELVAGISADGSADYIDSVKGRFTISRDNAKNSVYLQMNSLRAEDTAVYYCYAYRWVTRYTYWGQGTLVTVSS

SEQ ID NO: 248 - protein, 117 aa, synthetic construct
  REGION 1..117: note = Synthetic Construct
EVQLVESGGGLVQPGGSLTLSCAASGSSVRFLSMAWYRQAPGKKRELVAGISAHGSTDYIDSVKGRFTISRDNAKNSVYLQMNSLRAEDTAVYYCYAYRWSTRYTYWGQGTLVTVSS

SEQ ID NO: 249 - protein, 117 aa, synthetic construct
  REGION 1..117: note = Synthetic Construct
EVQLVESGGGLVQPGGSLTLSCAASGSSVRFLSMAWYRQAPGKKRELVAGISADGSTIYIDSVKGRFTISRDNAKNSVYLQMNSLRAEDTAVYYCYAYRWRTRYTYWGQGTLVTVSS

SEQ ID NO: 250 - protein, 117 aa, synthetic construct
  REGION 1..117: note = Synthetic Construct
EVQLVESGGGLVQPGGSLTLSCAASGSSVRFLSMAWYRQAPGKKRELVAGISRDGSTVYIDSVKGRFTISRDNAKNSVYLQMNSLRAEDTAVYYCYAYRWTTRGTYWGQGTLVTVSS

SEQ ID NO: 251 - protein, 117 aa, synthetic construct
  REGION 1..117: note = Synthetic Construct
EVQLVESGGGLVQPGGSLTLSCAASGSHVSFLSMAWYRQAPGKKRELVAGISADGPTDYIDSVKGRFTISRDNAKNSVYLQMNSLRAEDTAVYYCYAYRWDTRYTYWGQGTLVTVSS

SEQ ID NO: 252 - protein, 117 aa, synthetic construct
  REGION 1..117: note = Synthetic Construct
EVQLVESGGGLVQPGGSLTLSCVASGTSVSFLSMAWYRQAPGKKRELVAGISADGSTTYIDSVKGRFTISRDNAKNSVYLQMNSLRAEDTAVYYCYAYRWTTRRTYWGQGTLVTVSS

SEQ ID NO: 253 - protein, 117 aa, synthetic construct
  REGION 1..117: note = Synthetic Construct
EVQLVESGGGLVQPGGSLTLSCAASGTSVSFLSIAWYRQAPGKKRELVAGISADGSTDYIASVKGRFTISRDNAKNSVYLQMNSLRAEDTAVYYCYAYRWRTRYTYWGQGTLVTVSS

SEQ ID NO: 254 - protein, 117 aa, synthetic construct
  REGION 1..117: note = Synthetic Construct
EVQLVESGGGLVQPGGSLTLSCAASGSSVKFLSMAWYRQAPGKKRELVAGISLDGSTDYIDSVKGRFTISRDNAKNSVYLQMNSLRAEDTAVYYCYAYRWTGRYTYWGQGTLVTVSS

SEQ ID NO: 255 - protein, 117 aa, synthetic construct
  REGION 1..117: note = Synthetic Construct
EVQLVESGGGLVQPGGSLTLSCAASGSSVSFLSMAWYRQAPGKKRELVAGISADGSTIYIDSVKGRFTISRDNAKNSVYLQMNSLRAEDTAVYYCYAYRWRTRYTYWGQGTLVTVSS

SEQ ID NO: 256 - protein, 117 aa, synthetic construct
  REGION 1..117: note = Synthetic Construct
EVQLVESGGGLVQPGGSLTLSCAASGSSVRFLSMAWYRQAPGKKRELVAGISAHGSTDYIDSVKGRFTISRDNAKNSVYLQMNSLRAEDTAVYYCYAYRWRTRYTYWGQGTLVTVSS

SEQ ID NO: 257 - protein, 117 aa, synthetic construct
  REGION 1..117: note = Synthetic Construct
EVQLVESGGGLVQPGGSLTLSCAASGSSVSFLSMAWYRQAPGKKRELVAGISRDGSTDYIDSVKGRFTISRDNAKNSVYLQMNSLRAEDTAVYYCYAYRWITRYTYWGQGTLVTVSS

SEQ ID NO: 258 - protein, 117 aa, synthetic construct
  REGION 1..117: note = Synthetic Construct
EVQLVESGGGLVQPGGSLTLSCAASGSSVRFLSMAWYRQAPGKKRELVAGISRDGSTDYIDSVKGRFTISRDNAKNSVYLQMNSLRAEDTAVYYCYAYRWITRYTYWGQGTLVTVSS

SEQ ID NO: 259 - protein, 117 aa, synthetic construct
  REGION 1..117: note = Synthetic Construct
EVQLVESGGGLVQPGGSLTLSCAASGSSVVFLSMAWYRQAPGKKRELVAGISADGSMDYIDSVKGRFTISRDNAKNSVYLQMNSLRAEDTAVYYCYAYRWRTRYTYWGQGTLVTVSS

SEQ ID NO: 260 - protein, 117 aa, synthetic construct
  REGION 1..117: note = Synthetic Construct
EVQLVESGGGLVQPGGSLTLSCAASGSSVRFLSMAWYRQAPGKKRELVAGISADGSTDYIDSVKGRFTISRDNAKNSVYLQMNSLRAEDTAVYYCYAYRWTRRYTYWGQGTLVTVSS

SEQ ID NO: 261 - protein, 117 aa, synthetic construct
  REGION 1..117: note = Synthetic Construct
EVQLVESGGGLVQPGGSLTLSCAASGSSVRFLSMAWYRQAPGKKRELVAGISADGSTDYIDSVKGRFTISRDNAKNSVYLQMNSLRAEDTAVYYCYAYSWTTRYTYWGQGTLVTVSS

SEQ ID NO: 262 - protein, 117 aa, synthetic construct
  REGION 1..117: note = Synthetic Construct
EVQLVESGGGLVQPGGSLTLSCAASGSSVRFLSMAWYRQAPGKKRELVAGISANGSTDYIDSVKGRFTISRDNAKNSVYLQMNSLRAEDTAVYYCYAYRWTNRYTYWGQGTLVTVSS

SEQ ID NO: 263 - protein, 117 aa, synthetic construct
  REGION 1..117: note = Synthetic Construct
EVQLVESGGGLVQPGGSLTLSCAASGSSVSRLSMAWYRQAPGKKRELVAGISANGSTTYIDSVKGRFTISRDNAKNSVYLQMNSLRAEDTAVYYCYAYRWTTRYRYWGQGTLVTVSS

SEQ ID NO: 264 - protein, 117 aa, synthetic construct
  REGION 1..117: note = Synthetic Construct
EVQLVESGGGLVQPGGSLTLSCAASGSSKSFLSMAWYRQAPGKKRELVAGISADGSTSYIDSVKGRFTISRDNAKNSVYLQMNSLRAEDTAVYYCYAYRWTTRYTYWGQGTLVTVSS

SEQ ID NO: 265 - protein, 117 aa, synthetic construct
  REGION 1..117: note = Synthetic Construct
EVQLVESGGGLVQPGGSLTLSCAASGSSVSRLSMAWYRQAPGKKRELVAGISADGSRDYIDSVKGRFTISRDNAKNSVYLQMNSLRAEDTAVYYCYAYRWTTRYKYWGQGTLVTVSS

SEQ ID NO: 266 - protein, 117 aa, synthetic construct
  REGION 1..117: note = Synthetic Construct
EVQLVESGGGLVQPGGSLTLSCAASGSSVKFLSMAWYRQAPGKKRELVAGISADGSTMYIDSVKGRFTISRDNAKNSVYLQMNSLRAEDTAVYYCYAYRWHTRYTYWGQGTLVTVSS

SEQ ID NO: 267 - protein, 117 aa, synthetic construct
  REGION 1..117: note = Synthetic Construct
EVQLVESGGGLVQPGGSLTLSCAASGSGVRFLSMAWYRQAPGKKRELVAGISPDGSTDYIDSVKGRFTISRDNAKNSVYLQMNSLRAEDTAVYYCYAYRWTRRYTYWGQGTLVTVSS

SEQ ID NO: 268 - protein, 117 aa, synthetic construct
  REGION 1..117: note = Synthetic Construct
EVQLVESGGGLVQPGGSLTLSCAASGSSVRFLSMAWYRQAPGKKRELVAGISGDGSTDYIDSVKGRFTISRDNAKNSVYLQMNSLRAEDTAVYYCYAYRWMTRYTYWGQGTLVTVSS

SEQ ID NO: 269 - protein, 117 aa, synthetic construct
  REGION 1..117: note = Synthetic Construct
EVQLVESGGGLVQPGGSLTLSCAASGSSVHFLSMAWYRQAPGKKRELVAGISRDGSTDYIDSVKGRFTISRDNAKNSVYLQMNSLRAEDTAVYYCYAYRWTTRYRYWGQGTLVTVSS

SEQ ID NO: 270 - protein, 117 aa, synthetic construct
  REGION 1..117: note = Synthetic Construct
EVQLVESGGGLVQPGGSLTLSCAASGSSVRFLSMAWYRQAPGKKRELVAGISRDGSTDYIDSVKGRFTISRDNAKNSVYLQMNSLRAEDTAVYYCYAYRWSTRYTYWGQGTLVTVSS

SEQ ID NO: 271 - protein, 117 aa, synthetic construct
  REGION 1..117: note = Synthetic Construct
EVQLVESGGGLVQPGGSLTLSCAASGSKVSFLSMAWYRQAPGKKRELVAGISRDGSTDYIDSVKGRFTISRDNAKNSVYLQMNSLRAEDTAVYYCYAYRWTTRYTFWGQGTLVTVSS

SEQ ID NO: 272 - protein, 117 aa, synthetic construct
  REGION 1..117: note = Synthetic Construct
EVQLVESGGGLVQPGGSLTLSCAASGSSVSFLSMAWYRQAPGKKRELVAGISADGSTDYIDSVKGRFTISRDNAKNSVYLQMNSLRAEDTAVYYCYAYRWRTRYTYWGQGTLVTVSS

SEQ ID NO: 273 - protein, 117 aa, synthetic construct
  REGION 1..117: note = Synthetic Construct
EVQLVESGGGLVQPGGSLTLSCAASGSKVSFLSMAWYRQAPGKKRELVAGISTDGSTDYIDSVKGRFTISRDNAKNSVYLQMNSLRAEDTAVYYCYAYRWTTRRTYWGQGTLVTVSS

SEQ ID NO: 274 - protein, 117 aa, synthetic construct
  REGION 1..117: note = Synthetic Construct
EVQLVESGGGLVQPGGSLTLSCAASGSRVSFLSMAWYRQAPGKKRELVAGISADGSTSYIDSVKGRFTISRDNAKNSVYLQMNSLRAEDTAVYYCYAYRWATRYTYWGQGTLVTVSS

SEQ ID NO: 275 - protein, 117 aa, synthetic construct
  REGION 1..117: note = Synthetic Construct
EVQLVESGGGLVQPGGSLTLSCAASGSRVSFLSMAWYRQAPGKKRELVAGISADGSTLYIDSVKGRFTISRDNAKNSVYLQMNSLRAEDTAVYYCYAYRWHTRYTYWGQGTLVTVSS

SEQ ID NO: 276 - protein, 117 aa, synthetic construct
  REGION 1..117: note = Synthetic Construct
EVQLVESGGGLVQPGGSLTLSCAASGSSVRFLSMAWYRQAPGKKRELVAGISRDGSTDYIDSVKGRFTISRDNAKNSVYLQMNSLRAEDTAVYYCYAYRWGTRYTYWGQGTLVTVSS

SEQ ID NO: 277 - protein, 117 aa, synthetic construct
  REGION 1..117: note = Synthetic Construct
EVQLVESGGGLVQPGGSLTLSCAASYSSVSRLSMAWYRQAPGKKRELVAGISADGSTVYIDSVKGRFTISRDNAKNSVYLQMNSLRAEDTAVYYCYAYRWTTRNTYWGQGTLVTVSS

SEQ ID NO: 278 - protein, 117 aa, synthetic construct
  REGION 1..117: note = Synthetic Construct
EVQLVESGGGLVQPGGSLTLSCAASGSSVSFLSMAWYRQAPGKKRELVAGISTDGSTDYIDSVKGRFTISRDNAKNSVYLQMNSLRAEDTAVYYCYAYRWRTRYTYWGQGTLVTVSS

SEQ ID NO: 279 - protein, 117 aa, synthetic construct
  REGION 1..117: note = Synthetic Construct
EVQLVESGGGLVQPGGSLTLSCAASGSSVSFLSMAWYRQAPGKKRELVAGISADGSTLYIDSVKGRFTISRDNAKNSVYLQMNSLRAEDTAVYYCYAYRWTTRYAYWGQGTLVTVSS

SEQ ID NO: 280 - protein, 117 aa, synthetic construct
  REGION 1..117: note = Synthetic Construct
EVQLVESGGGLVQPGGSLTLSCAASGSSVSFLSMAWYRQAPGKKRELVAGISADGRTDYIDSVKGRFTISRDNAKNSVYLQMNSLRAEDTAVYYCYAYRWRTRYTYWGQGTLVTVSS

SEQ ID NO: 281 - protein, 117 aa, synthetic construct
  REGION 1..117: note = Synthetic Construct
EVQLVESGGGLVQPGGSLTLSCVASGTSVSFLSMAWYRQAPGKKRELVAGISADGSTIYIDSVKGRFTISRDNAKNSVYLQMNSLRAEDTAVYYCYAYRWTTRRTYWGQGTLVTVSS

SEQ ID NO: 282 - protein, 117 aa, synthetic construct
  REGION 1..117: note = Synthetic Construct
EVQLVESGGGLVQPGGSLTLSCAASGSSVKFLSMAWYRQAPGKKRELVAGISADGSTLYIDSVKGRFTISRDNAKNSVYLQMNSLRAEDTAVYYCYAYRWTTRRTYWGQGTLVTVSS

SEQ ID NO: 283 - protein, 117 aa, synthetic construct
  REGION 1..117: note = Synthetic Construct
EVQLVESGGGLVQPGGSLTLSCAASGSSVSFLSMAWYRQAPGKKRELVAGISRDGSTDYIDSVKGRFTISRDNAKNSVYLQMNSLRAEDTAVYYCYAYRWTSRYTYWGQGTLVTVSS

SEQ ID NO: 284 - protein, 117 aa, synthetic construct
  REGION 1..117: note = Synthetic Construct
EVQLVESGGGLVQPGGSLTLSCAASGSRVSFLSMAWYRQAPGKKRELVAGISKDGSTDYIDSVKGRFTISRDNAKNSVYLQMNSLRAEDTAVYYCYAYRWTTRVTYWGQGTLVTVSS

SEQ ID NO: 285 - protein, 117 aa, synthetic construct
  REGION 1..117: note = Synthetic Construct
EVQLVESGGGLVQPGGSLTLSCAASGSSVSVLSMAWYRQAPGKKRELVAGISADGSTDYIGSVKGRFTISRDNAKNSVYLQMNSLRAEDTAVYYCYAYRWTTRTTYWGQGTLVTVSS

SEQ ID NO: 286 - protein, 117 aa, synthetic construct
  REGION 1..117: note = Synthetic Construct
EVQLVESGGGLVQPGGSLTLSCAASGSSVSFLSMAWYRQAPGKKRELVAGISVDGSTDYIDSVKGRFTISRDNAKNSVYLQMNSLRAEDTAVYYCYAYRWRTRYTYWGQGTLVTVSS

SEQ ID NO: 287 - protein, 117 aa, synthetic construct
  REGION 1..117: note = Synthetic Construct
EVQLVESGGGLVQPGGSLTLSCAASGSRVSFLSMAWYRQAPGKKRELVAGISADGSTGYIDSVKGRFTISRDNAKNSVYLQMNSLRAEDTAVYYCYAYRWATRYTYWGQGTLVTVSS

SEQ ID NO: 288 - protein, 117 aa, synthetic construct
  REGION 1..117: note = Synthetic Construct
EVQLVESGGGLVQPGGSLTLSCVASGSSVKFLSMAWYRQAPGKKRELVAGISGDGSTTYIDSVKGRFTISRDNAKNSVYLQMNSLRAEDTAVYYCYAYRWTTRRTYWGQGTLVTVSS

SEQ ID NO: 289 - protein, 117 aa, synthetic construct
  REGION 1..117: note = Synthetic Construct
EVQLVESGGGLVQPGGSLTLSCAASGSSVRFLSMAWYRQAPGKKRELVAGISTDGSTDYIDSVKGRFTISRDNAKNSVYLQMNSLRAEDTAVYYCYALRWTTRYTYWGQGTLVTVSS

SEQ ID NO: 290 - protein, 117 aa, synthetic construct
  REGION 1..117: note = Synthetic Construct
EVQLVESGGGLVQPGGSLTLSCAASGSSVSQLSMAWYRQAPGKKRELVAGISADGSTDYFDSVKGRFTISRDNAKNSVYLQMNSLRAEDTAVYYCYAYRWTTRGTYWGQGTLVTVSS

SEQ ID NO: 291 - protein, 117 aa, synthetic construct
  REGION 1..117: note = Synthetic Construct
EVQLVESGGGLVQPGGSLTLSCAASGSRVSFLSMAWYRQAPGKKRELVAGISADGSTSYIDSVKGRFTISRDNAKNSVYLQMNSLRAEDTAVYYCYAYRWRTRYTYWGQGTLVTVSS

SEQ ID NO: 292 - protein, 117 aa, synthetic construct
  REGION 1..117: note = Synthetic Construct
EVQLVESGGGLVQPGGSLTLSCAASKSSVSFLSMAWYRQAPGKKRELVAGISADGSTDYIDSVKGRFTISRDNAKNSVYLQMNSLRAEDTAVYYCYAYRWTTRATYWGQGTLVTVSS

SEQ ID NO: 293 - protein, 117 aa, synthetic construct
  REGION 1..117: note = Synthetic Construct
EVQLVESGGGLVQPGGSLTLSCAASGSSVSFLSMAWYRQAPGKKRELVAGISADGSTAYIDSVKGRFTISRDNAKNSVYLQMNSLRAEDTAVYYCYAYRWTTRRTYWGQGTLVTVSS

SEQ ID NO: 294 - protein, 117 aa, synthetic construct
  REGION 1..117: note = Synthetic Construct
EVQLVESGGGLVQPGGSLTLSCAASGSSVKFLSMAWYRQAPGKKRELVAGISADGSTVYIDSVKGRFTISRDNAKNSVYLQMNSLRAEDTAVYYCYAYRWPTRYTYWGQGTLVTVSS

SEQ ID NO: 295 - protein, 117 aa, synthetic construct
  REGION 1..117: note = Synthetic Construct
EVQLVESGGGLVQPGGSLTLSCAASGSSVRFLSMAWYRQAPGKKRELVAGISQDGSTDYIDSVKGRFTISRDNAKNSVYLQMNSLRAEDTAVYYCYAYRWRTRYTYWGQGTLVTVSS

SEQ ID NO: 296 - protein, 117 aa, synthetic construct
  REGION 1..117: note = Synthetic Construct
EVQLVESGGGLVQPGGSLTLSCAASGSSVRFLSMAWYRQAPGKKRELVAGISNDGSTDYIDSVKGRFTISRDNAKNSVYLQMNSLRAEDTAVYYCYAYRWKTRYTYWGQGTLVTVSS

SEQ ID NO: 297 - protein, 117 aa, synthetic construct
  REGION 1..117: note = Synthetic Construct
EVQLVESGGGLVQPGGSLTLSCAASGSRVSFLSMAWYRQAPGKKRELVAGISARGSTDYIDSVKGRFTISRDNAKNSVYLQMNSLRAEDTAVYYCYAYRWSTRYTYWGQGTLVTVSS

SEQ ID NO: 298 - protein, 117 aa, synthetic construct
  REGION 1..117: note = Synthetic Construct
EVQLVESGGGLVQPGGSLTLSCAASGSSVSFLSLAWYRQAPGKKRELVAGISADGSTDYIDSVKGRFTISRDNAKNSVYLQMNSLRAEDTAVYYCYAYRWKTRRTYWGQGTLVTVSS

SEQ ID NO: 299 - protein, 117 aa, synthetic construct
  REGION 1..117: note = Synthetic Construct
EVQLVESGGGLVQPGGSLTLSCAASGSSVRFLSMAWYRQAPGKKRELVAGISRDGSTDYIDSVKGRFTISRDNAKNSVYLQMNSLRAEDTAVYYCYAYRWTTRRTYWGQGTLVTVSS

SEQ ID NO: 300 - protein, 117 aa, synthetic construct
  REGION 1..117: note = Synthetic Construct
EVQLVESGGGLVQPGGSLTLSCAASGSKVSFLSMAWYRQAPGKKRELVAGISADGSTLYIDSVKGRFTISRDNAKNSVYLQMNSLRAEDTAVYYCYAYRWTTRYRYWGQGTLVTVSS

SEQ ID NO: 301 - protein, 117 aa, synthetic construct
  REGION 1..117: note = Synthetic Construct
EVQLVESGGGLVQPGGSLTLSCAASGSSVSFLSMAWYRQAPGKKRELVAGISADGSTNYIDSVKGRFTISRDNAKNSVYLQMNSLRAEDTAVYYCYAYRWRTRYTYWGQGTLVTVSS

SEQ ID NO: 302 - protein, 117 aa, synthetic construct
  REGION 1..117: note = Synthetic Construct
EVQLVESGGGLVQPGGSLTLSCAASGSSVRFLSMAWYRQAPGKKRELVAGISADGSTVYIDSVKGRFTISRDNAKNSVYLQMNSLRAEDTAVYYCYAYRWTTRYKYWGQGTLVTVSS

SEQ ID NO: 303 - protein, 117 aa, synthetic construct
  REGION 1..117: note = Synthetic Construct
EVQLVESGGGLVQPGGSLTLSCAASGSKVSFLSMAWYRQAPGKKRELVAGISADGSTTYIDSVKGRFTISRDNAKNSVYLQMNSLRAEDTAVYYCYAYRWKTRYTYWGQGTLVTVSS

SEQ ID NO: 304 - protein, 117 aa, synthetic construct
  REGION 1..117: note = Synthetic Construct
EVQLVESGGGLVQPGGSLTLSCAASGSSVKFLSMAWYRQAPGKKRELVAGISADGSTDYIGSVKGRFTISRDNAKNSVYLQMNSLRAEDTAVYYCYAYRWTTRVTYWGQGTLVTVSS

SEQ ID NO: 305 - protein, 117 aa, synthetic construct
  REGION 1..117: note = Synthetic Construct
EVQLVESGGGLVQPGGSLTLSCAASGSSVKFLSMAWYRQAPGKKRELVAGISRDGSTDYIDSVKGRFTISRDNAKNSVYLQMNSLRAEDTAVYYCYAYRWTTRFTYWGQGTLVTVSS

SEQ ID NO: 306 - protein, 117 aa, synthetic construct
  REGION 1..117: note = Synthetic Construct
EVQLVESGGGLVQPGGSLTLSCAASGSRVSFLSMAWYRQAPGKKRELVAGISADGSTTYIDSVKGRFTISRDNAKNSVYLQMNSLRAEDTAVYYCYAYRWTTRFTYWGQGTLVTVSS

SEQ ID NO: 307 - protein, 117 aa, synthetic construct
  REGION 1..117: note = Synthetic Construct
EVQLVESGGGLVQPGGSLTLSCAASGSSVLFLSMAWYRQAPGKKRELVAGVSSDGSTDYIDSVKGRFTISRDNAKNSVYLQMNSLRAEDTAVYYCYAYRWRTRYTYWGQGTLVTVSS

SEQ ID NO: 308 - protein, 117 aa, synthetic construct
  REGION 1..117: note = Synthetic Construct
EVQLVESGGGLVQPGGSLTLSCAASGSRVSFLSMAWYRQAPGKKRELVAGISADGHTDYIDSVKGRFTISRDNAKNSVYLQMNSLRAEDTAVYYCYAYRWTTRYTHWGQGTLVTVSS

SEQ ID NO: 309 - protein, 117 aa, synthetic construct
  REGION 1..117: note = Synthetic Construct
EVQLVESGGGLVQPGGSLTLSCAASGSRVSFLSMAWYRQAPGKKRELVAGISADGSTDYFDSVKGRFTISRDNAKNSVYLQMNSLRAEDTAVYYCYAYRWTRRYTYWGQGTLVTVSS

SEQ ID NO: 310 - protein, 117 aa, synthetic construct
  REGION 1..117: note = Synthetic Construct
EVQLVESGGGLVQPGGSLTLSCAASGSSVGFLSMAWYRQAPGKKRELVAGISADGSTVYIDSVKGRFTISRDNAKNSVYLQMNSLRAEDTAVYYCYAYRWTTRYTYWGQGTLVTVSS

SEQ ID NO: 311 - protein, 117 aa, synthetic construct
  REGION 1..117: note = Synthetic Construct
EVQLVESGGGLVQPGGSLTLSCAASGSSVSFMSMAWYRQAPGKKRELVAGISADGSTDYIASVKGRFTISRDNAKNSVYLQMNSLRAEDTAVYYCYAYRWTTRSTYWGQGTLVTVSS

SEQ ID NO: 312 - protein, 117 aa, synthetic construct
  REGION 1..117: note = Synthetic Construct
EVQLVESGGGLVQPGGSLTLSCAASGSSVSFLSMAWYRQAPGKKRELVAGISADGSTDYISSVKGRFTISRDNAKNSVYLQMNSLRAEDTAVYYCYAYSWTTRYTYWGQGTLVTVSS

SEQ ID NO: 313 - protein, 117 aa, synthetic construct
  REGION 1..117: note = Synthetic Construct
EVQLVESGGGLVQPGGSLTLSCAASGSSVTFLSMAWYRQAPGKKRELVAGISADGSTVYIDSVKGRFTISRDNAKNSVYLQMNSLRAEDTAVYYCYAYRWTTRGTYWGQGTLVTVSS

SEQ ID NO: 314 - protein, 117 aa, synthetic construct
  REGION 1..117: note = Synthetic Construct
EVQLVESGGGLVQPGGSLTLSCAASGSSVRFLSMAWYRQAPGKKRELVAGISADGSTVYIDSVKGRFTISRDNAKNSVYLQMNSLRAEDTAVYYCYAYRWKTRYTYWGQGTLVTVSS

SEQ ID NO: 315 - protein, 117 aa, synthetic construct
  REGION 1..117: note = Synthetic Construct
EVQLVESGGGLVQPGGSLTLSCAASGSKVSFLSMAWYRQAPGKKRELVAGISADGSTTYIDSVKGRFTISRDNAKNSVYLQMNSLRAEDTAVYYCYAYRWTTRFTYWGQGTLVTVSS

SEQ ID NO: 316 - protein, 117 aa, synthetic construct
  REGION 1..117: note = Synthetic Construct
EVQLVESGGGLVQPGGSLTLSCAASGSKVSFMSMAWYRQAPGKKRELVAGISVDGSTDYIDSVKGRFTISRDNAKNSVYLQMNSLRAEDTAVYYCYAYRWRTRYTYWGQGTLVTVSS

SEQ ID NO: 317 - protein, 117 aa, synthetic construct
  REGION 1..117: note = Synthetic Construct
EVQLVESGGGLVQPGGSLTLSCAASGSSVSNLSMAWYRQAPGKKRELVAGISADGSTAYIDSVKGRFTISRDNAKNSVYLQMNSLRAEDTAVYYCYAYRWTTRRTYWGQGTLVTVSS

SEQ ID NO: 318 - protein, 117 aa, synthetic construct
  REGION 1..117: note = Synthetic Construct
EVQLVESGGGLVQPGGSLTLSCAASNSSVSKLSMAWYRQAPGKKRELVAGISADGSTAYIDSVKGRFTISRDNAKNSVYLQMNSLRAEDTAVYYCYAYRWSTRYTYWGQGTLVTVSS

SEQ ID NO: 319 - protein, 117 aa, synthetic construct
  REGION 1..117: note = Synthetic Construct
EVQLVESGGGLVQPGGSLTLSCAASGSKVSFLSMAWYRQAPGKKRELVAGISADGSKDYIDSVKGRFTISRDNAKNSVYLQMNSLRAEDTAVYYCYAYRWTTRLTYWGQGTLVTVSS

SEQ ID NO: 320 - protein, 117 aa, synthetic construct
  REGION 1..117: note = Synthetic Construct
EVQLVESGGGLVQPGGSLTLSCVASGSQVSFLSMAWYRQAPGKKRELVAGISADGSTDYFDSVKGRFTISRDNAKNSVYLQMNSLRAEDTAVYYCYAYRWTRRYTYWGQGTLVTVSS

SEQ ID NO: 321 - protein, 117 aa, synthetic construct
  REGION 1..117: note = Synthetic Construct
EVQLVESGGGLVQPGGSLTLSCAASGSKVSFMSMAWYRQAPGKKRELVAGISADGSTDYIDSVKGRFTISRDNAKNSVYLQMNSLRAEDTAVYYCYAYRWTTRLTYWGQGTLVTVSS

SEQ ID NO: 322 - protein, 117 aa, synthetic construct
  REGION 1..117: note = Synthetic Construct
EVQLVESGGGLVQPGGSLTLSCAASGSRVSFLSMAWYRQAPGKKRELVAGISADGSTVYIDSVKGRFTISRDNAKNSVYLQMNSLRAEDTAVYYCYAYRWTRRYTYWGQGTLVTVSS

SEQ ID NO: 323 - protein, 117 aa, synthetic construct
  REGION 1..117: note = Synthetic Construct
EVQLVESGGGLVQPGGSLTLSCAASGSSVRFLSMAWYRQAPGKKRELVAGISADGSTVYIDSVKGRFTISRDNAKNSVYLQMNSLRAEDTAVYYCYAYRWTTRRTYWGQGTLVTVSS

SEQ ID NO: 324 - protein, 117 aa, synthetic construct
  REGION 1..117: note = Synthetic Construct
EVQLVESGGGLVQPGGSLTLSCAASGSKVSFLSMAWYRQAPGKKRELVAGISARGSTDYIDSVKGRFTISRDNAKNSVYLQMNSLRAEDTAVYYCYAYQWTTRYTYWGQGTLVTVSS

SEQ ID NO: 325 - protein, 117 aa, synthetic construct
  REGION 1..117: note = Synthetic Construct
EVQLVESGGGLVQPGGSLTLSCAASGSSVRFLSMAWYRQAPGKKRELVAGISATGSTDYIDSVKGRFTISRDNAKNSVYLQMNSLRAEDTAVYYCYAYRWTRRYTYWGQGTLVTVSS

SEQ ID NO: 326 - protein, 117 aa, synthetic construct
  REGION 1..117: note = Synthetic Construct
EVQLVESGGGLVQPGGSLTLSCAASGSSVSFLSIAWYRQAPGKKRELVAGISKDGSTDYIDSVKGRFTISRDNAKNSVYLQMNSLRAEDTAVYYCYAYRWTTRMTYWGQGTLVTVSS

SEQ ID NO: 327 - protein, 117 aa, synthetic construct
  REGION 1..117: note = Synthetic Construct
EVQLVESGGGLVQPGGSLTLSCAASGSSSSFLSMAWYRQAPGKKRELVAGISADGSTVYIDSVKGRFTISRDNAKNSVYLQMNSLRAEDTAVYYCYAYRWTTRRTYWGQGTLVTVSS

SEQ ID NO: 328 - protein, 117 aa, synthetic construct
  REGION 1..117: note = Synthetic Construct
EVQLVESGGGLVQPGGSLTLSCAASGSSVKFLSMAWYRQAPGKKRELVAGISPDGSTDYIDSVKGRFTISRDNAKNSVYLQMNSLRAEDTAVYYCYAYRWTTRYRYWGQGTLVTVSS

SEQ ID NO: 329 - protein, 117 aa, synthetic construct
  REGION 1..117: note = Synthetic Construct
EVQLVESGGGLVQPGGSLTLSCAASGSSVNFLSMAWYRQAPGKKRELVAGISADGSTHYIDSVKGRFTISRDNAKNSVYLQMNSLRAEDTAVYYCYAYRWLTRYTYWGQGTLVTVSS

SEQ ID NO: 330 - protein, 117 aa, synthetic construct
  REGION 1..117: note = Synthetic Construct
EVQLVESGGGLVQPGGSLTLSCAASGSSVKFLSMAWYRQAPGKKRELVAGISADGSTDYILSVKGRFTISRDNAKNSVYLQMNSLRAEDTAVYYCYAYEWTTRYTYWGQGTLVTVSS

SEQ ID NO: 331 - protein, 117 aa, synthetic construct
  REGION 1..117: note = Synthetic Construct
EVQLVESGGGLVQPGGSLTLSCAASGSSVSFLSMAWYRQAPGKKRELVAGISADGSTDYIHSVKGRFTISRDNAKNSVYLQMNSLRAEDTAVYYCYAYRWRTRYTYWGQGTLVTVSS

SEQ ID NO: 332 - protein, 117 aa, synthetic construct
  REGION 1..117: note = Synthetic Construct
EVQLVESGGGLVQPGGSLTLSCAASGSSVRFLSMAWYRQAPGKKRELVAGISVDGSTDYIDSVKGRFTISRDNAKNSVYLQMNSLRAEDTAVYYCYAYRWRTRYTYWGQGTLVTVSS

SEQ ID NO: 333 - protein, 117 aa, synthetic construct
  REGION 1..117: note = Synthetic Construct
EVQLVESGGGLVQPGGSLTLSCAASGSSVSFLSVAWYRQAPGKKRELVAGISRDGSTDYIDSVKGRFTISRDNAKNSVYLQMNSLRAEDTAVYYCYAYRWRTRYTYWGQGTLVTVSS

SEQ ID NO: 334 - protein, 117 aa, synthetic construct
  REGION 1..117: note = Synthetic Construct
EVQLVESGGGLVQPGGSLTLSCAASGSQVSFLSMAWYRQAPGKKRELVAGISADGSTVYIDSVKGRFTISRDNAKNSVYLQMNSLRAEDTAVYYCYAYRWSTRYTYWGQGTLVTVSS

SEQ ID NO: 335 - protein, 117 aa, synthetic construct
  REGION 1..117: note = Synthetic Construct
EVQLVESGGGLVQPGGSLTLSCAASGTSVSFLSMAWYRQAPGKKRELVAGISADGSTDYIRSVKGRFTISRDNAKNSVYLQMNSLRAEDTAVYYCYAYRWTTRLTYWGQGTLVTVSS

SEQ ID NO: 336 - protein, 117 aa, synthetic construct
  REGION 1..117: note = Synthetic Construct
EVQLVESGGGLVQPGGSLTLSCAASGSRVSFLSMAWYRQAPGKKRELVAGISADGSTMYIDSVKGRFTISRDNAKNSVYLQMNSLRAEDTAVYYCYAYRWTTRLTYWGQGTLVTVSS

SEQ ID NO: 337 - protein, 117 aa, synthetic construct
  REGION 1..117: note = Synthetic Construct
EVQLVESGGGLVQPGGSLTLSCAASGSSVKFLSMAWYRQAPGKKRELVAGISTDGSTDYIDSVKGRFTISRDNAKNSVYLQMNSLRAEDTAVYYCYAYKWTTRYTYWGQGTLVTVSS

SEQ ID NO: 338 - protein, 117 aa, synthetic construct
  REGION 1..117: note = Synthetic Construct
EVQLVESGGGLVQPGGSLTLSCAASGSSVSFLSSAWYRQAPGKKRELVAGISADGSTLYIDSVKGRFTISRDNAKNSVYLQMNSLRAEDTAVYYCYAYRWTTRSTYWGQGTLVTVSS

SEQ ID NO: 339 - protein, 117 aa, synthetic construct
  REGION 1..117: note = Synthetic Construct
EVQLVESGGGLVQPGGSLTLSCAASGSSVKFLSMAWYRQAPGKKRELVAGISADGSTDYIDSVKGRFTISRDNAKNSVYLQMNSLRAEDTAVYYCYAYRWRTRYTYWGQGTLVTVSS

SEQ ID NO: 340 - protein, 117 aa, synthetic construct
  REGION 1..117: note = Synthetic Construct
EVQLVESGGGLVQPGGSLTLSCAASGSSVSFLSMAWYRQAPGKKRELVAGISATGSTDYIDSVKGRFTISRDNAKNSVYLQMNSLRAEDTAVYYCYAYRWSTRYTYWGQGTLVTVSS

SEQ ID NO: 341 - protein, 117 aa, synthetic construct
  REGION 1..117: note = Synthetic Construct
EVQLVESGGGLVQPGGSLTLSCAASGSTVSFLSMAWYRQAPGKKRELVAGISHDGSTDYIDSVKGRFTISRDNAKNSVYLQMNSLRAEDTAVYYCYAYRWTTRYTYWGQGTLVTVSS

SEQ ID NO: 342 - protein, 117 aa, synthetic construct
  REGION 1..117: note = Synthetic Construct
EVQLVESGGGLVQPGGSLTLSCAASGSSVQFLSMAWYRQAPGKKRELVAGISYDGSTDYIDSVKGRFTISRDNAKNSVYLQMNSLRAEDTAVYYCYAYRWRTRYTYWGQGTLVTVSS

SEQ ID NO: 343 - protein, 117 aa, synthetic construct
  REGION 1..117: note = Synthetic Construct
EVQLVESGGGLVQPGGSLTLSCAASRSSVSFLSMAWYRQAPGKKRELVAGISTDGSTDYIDSVKGRFTISRDNAKNSVYLQMNSLRAEDTAVYYCYAYRWLTRYTYWGQGTLVTVSS

SEQ ID NO: 344 - protein, 117 aa, synthetic construct
  REGION 1..117: note = Synthetic Construct
EVQLVESGGGLVQPGGSLTLSCAASGSKVSFLSMAWYRQAPGKKRELVAGISADGSTAYIDSVKGRFTISRDNAKNSVYLQMNSLRAEDTAVYYCYAYRWRTRYTYWGQGTLVTVSS

SEQ ID NO: 345 - protein, 117 aa, synthetic construct
  REGION 1..117: note = Synthetic Construct
EVQLVESGGGLVQPGGSLTLSCAASGSRVSFLSMAWYRQAPGKKRELVAGISADGSTDYIESVKGRFTISRDNAKNSVYLQMNSLRAEDTAVYYCYAYRWTTRYTYWGQGTLVTVSS

SEQ ID NO: 346 - protein, 117 aa, synthetic construct
  REGION 1..117: note = Synthetic Construct
EVQLVESGGGLVQPGGSLTLSCAASGSSVSFLSMAWYRQAPGKKRELVAGISIDGSTDYIKSVKGRFTISRDNAKNSVYLQMNSLRAEDTAVYYCYAYRWTTRYRYWGQGTLVTVSS

SEQ ID NO: 347 - protein, 117 aa, synthetic construct
  REGION 1..117: note = Synthetic Construct
EVQLVESGGGLVQPGGSLTLSCAASGSKVSFLSMAWYRQAPGKKRELVAGISADGSKDYIDSVKGRFTISRDNAKNSVYLQMNSLRAEDTAVYYCYAYRWTTRYTYWGQGTLVTVSS

SEQ ID NO: 348 - protein, 117 aa, synthetic construct
  REGION 1..117: note = Synthetic Construct
EVQLVESGGGLVQPGGSLTLSCAASGSSVRFLSMAWYRQAPGKKRELVAGISADGSTVYIDSVKGRFTISRDNAKNSVYLQMNSLRAEDTAVYYCYAYRWPTRYTYWGQGTLVTVSS

SEQ ID NO: 349 - protein, 117 aa, synthetic construct
  REGION 1..117: note = Synthetic Construct
EVQLVESGGGLVQPGGSLTLSCAASGSSVKFLSMAWYRQAPGKKRELVAGISRDGSTDYIDSVKGRFTISRDNAKNSVYLQMNSLRAEDTAVYYCYAYRWTTRHTYWGQGTLVTVSS

SEQ ID NO: 350 - protein, 117 aa, synthetic construct
  REGION 1..117: note = Synthetic Construct
EVQLVESGGGLVQPGGSLTLSCAASGSSVKFLSMAWYRQAPGKKRELVAGISADGSTDYIHSVKGRFTISRDNAKNSVYLQMNSLRAEDTAVYYCYAYRWTRRYTYWGQGTLVTVSS

SEQ ID NO: 351 - protein, 117 aa, synthetic construct
  REGION 1..117: note = Synthetic Construct
EVQLVESGGGLVQPGGSLTLSCAASGSSVSILSMAWYRQAPGKKRELVAGISADGSTIYIDSVKGRFTISRDNAKNSVYLQMNSLRAEDTAVYYCYAYRWHTRYTYWGQGTLVTVSS

SEQ ID NO: 352 - protein, 117 aa, synthetic construct
  REGION 1..117: note = Synthetic Construct
EVQLVESGGGLVQPGGSLTLSCAASGSSVSFLSVAWYRQAPGKKRELVAGISANGSTDYIDSVKGRFTISRDNAKNSVYLQMNSLRAEDTAVYYCYAYRWTNRYTYWGQGTLVTVSS

SEQ ID NO: 353 - protein, 117 aa, synthetic construct
  REGION 1..117: note = Synthetic Construct
EVQLVESGGGLVQPGGSLTLSCAASGSSVRFLSMAWYRQAPGKKRELVAGISTDGSTDYIDSVKGRFTISRDNAKNSVYLQMNSLRAEDTAVYYCYAYRWTTRYRYWGQGTLVTVSS

SEQ ID NO: 354 - protein, 117 aa, synthetic construct
  REGION 1..117: note = Synthetic Construct
EVQLVESGGGLVQPGGSLTLSCAASGSRVSFLSMAWYRQAPGKKRELVAGISYDGSTDYIDSVKGRFTISRDNAKNSVYLQMNSLRAEDTAVYYCYAYRWTTRRTYWGQGTLVTVSS

SEQ ID NO: 355 - protein, 117 aa, synthetic construct
  REGION 1..117: note = Synthetic Construct
EVQLVESGGGLVQPGGSLTLSCAASGHSVSFLSMAWYRQAPGKKRELVAGISADGSTDYIASVKGRFTISRDNAKNSVYLQMNSLRAEDTAVYYCYAYRWSTRYTYWGQGTLVTVSS

SEQ ID NO: 356 - protein, 117 aa, synthetic construct
  REGION 1..117: note = Synthetic Construct
EVQLVESGGGLVQPGGSLTLSCAASGSSVRFLSMAWYRQAPGKKRELVAGISADGSTDYIGSVKGRFTISRDNAKNSVYLQMNSLRAEDTAVYYCYAYRWSTRYTYWGQGTLVTVSS

SEQ ID NO: 357 - protein, 117 aa, synthetic construct
  REGION 1..117: note = Synthetic Construct
EVQLVESGGGLVQPGGSLTLSCAASGSSVSFLSMAWYRQAPGKKRELVAGISANGSTDYYDSVKGRFTISRDNAKNSVYLQMNSLRAEDTAVYYCYAYRWRTRYTYWGQGTLVTVSS

SEQ ID NO: 358 - protein, 117 aa, synthetic construct
  REGION 1..117: note = Synthetic Construct
EVQLVESGGGLVQPGGSLTLSCAASGSRVSFLSMAWYRQAPGKKRELVAGISADGSTSYIDSVKGRFTISRDNAKNSVYLQMNSLRAEDTAVYYCYAYRWTTRYTYWGQGTLVTVSS

SEQ ID NO: 359 - protein, 117 aa, synthetic construct
  REGION 1..117: note = Synthetic Construct
EVQLVESGGGLVQPGGSLTLSCAASGSSVKFLSMAWYRQAPGKKRELVAGVSADGSTDYIDSVKGRFTISRDNAKNSVYLQMNSLRAEDTAVYYCYAYEWTTRYTYWGQGTLVTVSS

SEQ ID NO: 360 - protein, 117 aa, synthetic construct
  REGION 1..117: note = Synthetic Construct
EVQLVESGGGLVQPGGSLTLSCAASGSSVSRLSMAWYRQAPGKKRELVAGISARGSTDYIDSVKGRFTISRDNAKNSVYLQMNSLRAEDTAVYYCYAYRWTTRSTYWGQGTLVTVSS

SEQ ID NO: 361 - protein, 117 aa, synthetic construct
  REGION 1..117: note = Synthetic Construct
EVQLVESGGGLVQPGGSLTLSCAASGRSVSFLSMAWYRQAPGKKRELVAGISADGSTIYIDSVKGRFTISRDNAKNSVYLQMNSLRAEDTAVYYCYAYRWTTRYTYWGQGTLVTVSS

SEQ ID NO: 362 - protein, 117 aa, synthetic construct
  REGION 1..117: note = Synthetic Construct
EVQLVESGGGLVQPGGSLTLSCAASGRSVSFLSMAWYRQAPGKKRELVAGISANGSTDYIDSVKGRFTISRDNAKNSVYLQMNSLRAEDTAVYYCYAYRWSTRYTYWGQGTLVTVSS

SEQ ID NO: 363 - protein, 117 aa, synthetic construct
  REGION 1..117: note = Synthetic Construct
EVQLVESGGGLVQPGGSLTLSCAASGSSVKFLSMAWYRQAPGKKRELVAGISADGSTDYVDSVKGRFTISRDNAKNSVYLQMNSLRAEDTAVYYCYAYRWSTRYTYWGQGTLVTVSS

SEQ ID NO: 364 - protein, 117 aa, synthetic construct
  REGION 1..117: note = Synthetic Construct
EVQLVESGGGLVQPGGSLTLSCAASGSSVSKLSMAWYRQAPGKKRELVAGISADGSTDYRDSVKGRFTISRDNAKNSVYLQMNSLRAEDTAVYYCYAYRWTYRYTYWGQGTLVTVSS

SEQ ID NO: 365 - protein, 117 aa, synthetic construct
  REGION 1..117: note = Synthetic Construct
EVQLVESGGGLVQPGGSLTLSCAASGSSVSRLSMAWYRQAPGKKRELVAGISVDGSTDYIDSVKGRFTISRDNAKNSVYLQMNSLRAEDTAVYYCYAYRWTTRLTYWGQGTLVTVSS

SEQ ID NO: 366 - protein, 117 aa, synthetic construct
  REGION 1..117: note = Synthetic Construct
EVQLVESGGGLVQPGGSLTLSCAASGSSVKFLSLAWYRQAPGKKRELVAGISADGSTDYILSVKGRFTISRDNAKNSVYLQMNSLRAEDTAVYYCYAYEWTTRYTYWGQGTLVTVSS

SEQ ID NO: 367 - protein, 117 aa, synthetic construct
  REGION 1..117: note = Synthetic Construct
EVQLVESGGGLVQPGGSLTLSCAASGSSVSRLSLAWYRQAPGKKRELVAGISVDGSTDYIDSVKGRFTISRDNAKNSVYLQMNSLRAEDTAVYYCYAYRWTTRLTYWGQGTLVTVSS

SEQ ID NO: 368 - protein, 119 aa, synthetic construct
  REGION 1..119: note = Synthetic Construct
EVQLVESGGGLVQPGGSLTLSCVASGTSSSINAMGWYRRAPGKQRELVAGISSDGSKVFNESVKGRFTISRDNAKNSVYLQMNSLRAEDTAVYYCYYFRPAAGSPMRYWGQGTLVTVSS

SEQ ID NO: 369 - protein, 119 aa, synthetic construct
  REGION 1..119: note = Synthetic Construct
EVQLVESGGGLVQPGGSLTLSCVASGTTSSINAIGWYRRAPGKQRELVAGISSDGSEVYTDSVKGRFTISRDNAKNSVYLQMNSLRAEDTAVYYCYYFRTVDGSPLRYWGQGTLVTVSS

SEQ ID NO: 370 - protein, 119 aa, synthetic construct
  REGION 1..119: note = Synthetic Construct
EVQLVESGGGLVQPGGSLTLSCVASGSTSSINAMAWYRRAPGKQRELVAGISSDDSNVYYESVKGRFTISRDNAKNSVYLQMNSLRAEDTAVYYCYYFRTVSGSSKRYWGQGTLVTVSS

SEQ ID NO: 371 - protein, 119 aa, synthetic construct
  REGION 1..119: note = Synthetic Construct
EVQLVESGGGLVQPGGSLTLSCVASGQTYRVNAFGWYRRAPGKQRELVAGISSDGSKVYADSVKGRFTISRDNAKNSVYLQMNSLRAEDTAVYYCYYFSAGSGTEMSYWGQGTLVTVSS

SEQ ID NO: 372 - protein, 119 aa, synthetic construct
  REGION 1..119: note = Synthetic Construct
EVQLVESGGGLVQPGGSLTLSCVASGSTSSINAMAWYRRAPGKQRELVAGISSDESTLYVDSVKGRFTISRDNAKNSVYLQMNSLRAEDTAVYYCYYFGSLSGSSTTYWGQGTLVTVSS

SEQ ID NO: 373 - protein, 119 aa, synthetic construct
  REGION 1..119: note = Synthetic Construct
EVQLVESGGGLVQPGGSLTLSCVASGSASLTNATGWYRRAPGKQRELVAGISSDDSKVYSDSVKGRFTISRDNAKNSVYLQMNSLRAEDTAVYYCYYFGSVSGSWTRYWGQGTLVTVSS

SEQ ID NO: 374 - protein, 119 aa, synthetic construct
  REGION 1..119: note = Synthetic Construct
EVQLVESGGGLVQPGGSLTLSCVASGYPSLNNAMGWYRRAPGKQRELVAGISSDGSQVYGASVKGRFTISRDNAKNSVYLQMNSLRAEDTAVYYCYYFRLVSGSSMSYWGQGTLVTVSS

SEQ ID NO: 375 - protein, 119 aa, synthetic construct
  REGION 1..119: note = Synthetic Construct
EVQLVESGGGLVQPGGSLTLSCVASGSSSTINAIGWYRRAPGKQRELVAGISSDGSKVYADSVKGRFTISRDNAKNSVYLQMNSLRAEDTAVYYCYYFRTGSGTSKSYWGQGTLVTVSS

SEQ ID NO: 376 - protein, 119 aa, synthetic construct
  REGION 1..119: note = Synthetic Construct
EVQLVESGGGLVQPGGSLTLSCVASGSTSYINAMGWYRRAPGKQRELVAGISSDGSNMYADSVKGRFTISRDNAKNSVYLQMNSLRAEDTAVYYCYYFSNMSGTTRRYWGQGTLVTVSS

SEQ ID NO: 377 - protein, 119 aa, synthetic construct
  REGION 1..119: note = Synthetic Construct
EVQLVESGGGLVQPGGSLTLSCVASGSTSSVNALGWYRRAPGKQRELVAGISSDGSKVYTDSVKGRFTISRDNAKNSVYLQMNSLRAEDTAVYYCYYFRTVPGSAMGYWGQGTLVTVSS

SEQ ID NO: 378 - protein, 119 aa, synthetic construct
  REGION 1..119: note = Synthetic Construct
EVQLVESGGGLVQPGGSLTLSCVASGSTSLSNAVGWYRRAPGKQRELVAGISSDGSKVSAESVKGRFTISRDNAKNSVYLQMNSLRAEDTAVYYCYYFRAESGSSMGYWGQGTLVTVSS

SEQ ID NO: 379 - protein, 119 aa, synthetic construct
  REGION 1..119: note = Synthetic Construct
EVQLVESGGGLVQPGGSLTLSCVASGSTSSTNAIGWYRRAPGKQRELVAGISSDGSKVYDDSVKGRFTISRDNAKNSVYLQMNSLRAEDTAVYYCYYFRTLYGSSRSYWGQGTLVTVSS

SEQ ID NO: 380 - protein, 119 aa, synthetic construct
  REGION 1..119: note = Synthetic Construct
EVQLVESGGGLVQPGGSLTLSCVASGLTSTINAMGWYRRAPGKQRELVAGISSDGSKVYDDSVKGRFTISRDNAKNSVYLQMNSLRAEDTAVYYCYYFSPFSGSDTGYWGQGTLVTVSS

SEQ ID NO: 381 - protein, 119 aa, synthetic construct
  REGION 1..119: note = Synthetic Construct
EVQLVESGGGLVQPGGSLTLSCVASGVSPSKNAIGWYRRAPGKQRELVAGISSDGSAVYVGSVKGRFTISRDNAKNSVYLQMNSLRAEDTAVYYCYYFSTFSGSSISYWGQGTLVTVSS

SEQ ID NO: 382 - protein, 119 aa, synthetic construct
  REGION 1..119: note = Synthetic Construct
EVQLVESGGGLVQPGGSLTLSCVASGSTSSINAVGWYRRAPGKQRELVAGISSDGSYVYSESVKGRFTISRDNAKNSVYLQMNSLRAEDTAVYYCYYFRTLAGSEMRYWGQGTLVTVSS

SEQ ID NO: 383 - protein, 119 aa, synthetic construct
  REGION 1..119: note = Synthetic Construct
EVQLVESGGGLVQPGGSLTLSCVASGSTTMNNAMAWYRRAPGKQRELVAGISSDSSHVYADSVKGRFTISRDNAKNSVYLQMNSLRAEDTAVYYCYYFRTVSGSGVRYWGQGTLVTVSS

SEQ ID NO: 384 - protein, 119 aa, synthetic construct
  REGION 1..119: note = Synthetic Construct
EVQLVESGGGLVQPGGSLTLSCVASGSTSKINAIGWYRRAPGKQRELVAGISSDSSIVYTDSVKGRFTISRDNAKNSVYLQMNSLRAEDTAVYYCYYFRPGAGHSNSYWGQGTLVTVSS

SEQ ID NO: 385 - protein, 119 aa, synthetic construct
  REGION 1..119: note = Synthetic Construct
EVQLVESGGGLVQPGGSLTLSCVASGQTTALNAMGWYRRAPGKQRELVAGISSDGSEVNTDSVKGRFTISRDNAKNSVYLQMNSLRAEDTAVYYCYYFRRASGTAMSYWGQGTLVTVSS

SEQ ID NO: 386 - protein, 119 aa, synthetic construct
  REGION 1..119: note = Synthetic Construct
EVQLVESGGGLVQPGGSLTLSCVASGATSSINAIGWYRRAPGKQRELVAGISSDGSKLSSDSVKGRFTISRDNAKNSVYLQMNSLRAEDTAVYYCYYFTSASGTDLSYWGQGTLVTVSS

SEQ ID NO: 387 - protein, 119 aa, synthetic construct
  REGION 1..119: note = Synthetic Construct
EVQLVESGGGLVQPGGSLTLSCVASGSTSTINAMGWYRRAPGKQRELVAGISSDNSKVYADSVKGRFTISRDNAKNSVYLQMNSLRAEDTAVYYCYYFRSANGSSKRYWGQGTLVTVSS

SEQ ID NO: 388 - protein, 119 aa, synthetic construct
  REGION 1..119: note = Synthetic Construct
EVQLVESGGGLVQPGGSLTLSCVASGSTSSINAMGWYRRAPGKQRELVAGISSDGSRVYFDSVKGRFTISRDNAKNSVYLQMNSLRAEDTAVYYCYYFKTIAGAGMRYWGQGTLVTVSS

SEQ ID NO: 389 - protein, 119 aa, synthetic construct
  REGION 1..119: note = Synthetic Construct
EVQLVESGGGLVQPGGSLTLSCVASGSTSLVNAMGWYRRAPGKQRELVAGISSDGSLVYAESVKGRFTISRDNAKNSVYLQMNSLRAEDTAVYYCYYFRYGSGSSLSYWGQGTLVTVSS

SEQ ID NO: 390 - protein, 119 aa, synthetic construct
  REGION 1..119: note = Synthetic Construct
EVQLVESGGGLVQPGGSLTLSCVASGSTSLNNAIGWYRRAPGKQRELVAGISSDGSVVYVDSVKGRFTISRDNAKNSVYLQMNSLRAEDTAVYYCYYFRTVPGASMKYWGQGTLVTVSS

SEQ ID NO: 391 - protein, 119 aa, synthetic construct
  REGION 1..119: note = Synthetic Construct
EVQLVESGGGLVQPGGSLTLSCVASGSTSPVNAMAWYRRAPGKQRELVAGISSDGSKVYVDSVKGRFTISRDNAKNSVYLQMNSLRAEDTAVYYCYYFRTVDGSAISYWGQGTLVTVSS

SEQ ID NO: 392 - protein, 119 aa, synthetic construct
  REGION 1..119: note = Synthetic Construct
EVQLVESGGGLVQPGGSLTLSCVASGTTSSMNAIGWYRRAPGKQRELVAGISSDGSKLYDESVKGRFTISRDNAKNSVYLQMNSLRAEDTAVYYCYYFRTVKGSGGSYWGQGTLVTVSS

SEQ ID NO: 393 - protein, 119 aa, synthetic construct
  REGION 1..119: note = Synthetic Construct
EVQLVESGGGLVQPGGSLTLSCVASGETSSINAMAWYRRAPGKQRELVAGISSDYSKLYADSVKGRFTISRDNAKNSVYLQMNSLRAEDTAVYYCYYFRTVSGSSRGYWGQGTLVTVSS

SEQ ID NO: 394 - protein, 119 aa, synthetic construct
  REGION 1..119: note = Synthetic Construct
EVQLVESGGGLVQPGGSLTLSCVASGSTSTINAIGWYRRAPGKQRELVAGISSDSSKVYTESVKGRFTISRDNAKNSVYLQMNSLRAEDTAVYYCYYFRPGPGSQMAYWGQGTLVTVSS

SEQ ID NO: 395 - protein, 119 aa, synthetic construct
  REGION 1..119: note = Synthetic Construct
EVQLVESGGGLVQPGGSLTLSCVASGSTYSMNAMGWYRRAPGKQRELVAGISSDGSQVYVDSVKGRFTISRDNAKNSVYLQMNSLRAEDTAVYYCYYFRTVAGSASGYWGQGTLVTVSS

SEQ ID NO: 396 - protein, 119 aa, synthetic construct; identical to SEQ ID NO: 227
  REGION 1..119: note = Synthetic Construct

SEQ ID NO: 397 - protein, 119 aa, synthetic construct
  REGION 1..119: note = Synthetic Construct
EVQLVESGGGLVQPGGSLTLSCVASGSTSTINAIGWYRRAPGKQRELVAGISSDGSKVYVDSVKGRFTISRDNAKNSVYLQMNSLRAEDTAVYYCYYFINLKGSSMAYWGQGTLVTVSS

SEQ ID NO: 398 - protein, 119 aa, synthetic construct
  REGION 1..119: note = Synthetic Construct
EVQLVESGGGLVQPGGSLTLSCVASGSTSSINAIGWYRRAPGKQRELVAGISSDGSKVYADSVKGRFTISRDNAKNSVYLQMNSLRAEDTAVYYCYYFRMVTGSYGGYWGQGTLVTVSS

SEQ ID NO: 399 - protein, 119 aa, synthetic construct
  REGION 1..119: note = Synthetic Construct
EVQLVESGGGLVQPGGSLTLSCVASGSISSINAMGWYRRAPGKQRELVAGISSDGSSVYADSVKGRFTISRDNAKNSVYLQMNSLRAEDTAVYYCYYFKSSYGLPMRYWGQGTLVTVSS

SEQ ID NO: 400 - protein, 119 aa, synthetic construct
  REGION 1..119: note = Synthetic Construct
EVQLVESGGGLVQPGGSLTLSCVASGSTQVNNAMAWYRRAPGKQRELVAGISSDGSQVYYGSVKGRFTISRDNAKNSVYLQMNSLRAEDTAVYYCYYFKTVSGQSLRYWGQGTLVTVSS

SEQ ID NO: 401 - protein, 119 aa, synthetic construct
  REGION 1..119: note = Synthetic Construct
EVQLVESGGGLVQPGGSLTLSCVASGSTASFNAMAWYRRAPGKQRELVAGISSDGSKVYTDSVKGRFTISRDNAKNSVYLQMNSLRAEDTAVYYCYYFRTVTGRAARYWGQGTLVTVSS

SEQ ID NO: 402 - protein, 119 aa, synthetic construct
  REGION 1..119: note = Synthetic Construct
EVQLVESGGGLVQPGGSLTLSCVASGSPLSINAIGWYRRAPGKQRELVAGISSDGSKVSADSVKGRFTISRDNAKNSVYLQMNSLRAEDTAVYYCYYFGPAIGASRTYWGQGTLVTVSS

SEQ ID NO: 403 - protein, 119 aa, synthetic construct
  REGION 1..119: note = Synthetic Construct
EVQLVESGGGLVQPGGSLTLSCVASGSTTFINAIGWYRRAPGKQRELVAGISSDGSKVYEDSVKGRFTISRDNAKNSVYLQMNSLRAEDTAVYYCYYFRTVSGAPKSYWGQGTLVTVSS

SEQ ID NO: 404 - protein, 119 aa, synthetic construct
  REGION 1..119: note = Synthetic Construct
EVQLVESGGGLVQPGGSLTLSCVASGSTSSINAIGWYRRAPGKQRELVAGISSDRSKVYADSVKGRFTISRDNAKNSVYLQMNSLRAEDTAVYYCYYFHTVSGSSMSYWGQGTLVTVSS

SEQ ID NO: 405 - protein, 119 aa, synthetic construct
  REGION 1..119: note = Synthetic Construct
EVQLVESGGGLVQPGGSLTLSCVASGETDTINAVGWYRRAPGKQRELVAGISSDGSKVYAESVKGRFTISRDNAKNSVYLQMNSLRAEDTAVYYCYYFRRLEGYSNRYWGQGTLVTVSS

SEQ ID NO: 406 - protein, 119 aa, synthetic construct
  REGION 1..119: note = Synthetic Construct
EVQLVESGGGLVQPGGSLTLSCVASGSTSPINAIGWYRRAPGKQRELVAGISSDGSVVTTESVKGRFTISRDNAKNSVYLQMNSLRAEDTAVYYCYYFRTGSGSSMGYWGQGTLVTVSS

SEQ ID NO: 407 - protein, 119 aa, synthetic construct
  REGION 1..119: note = Synthetic Construct
EVQLVESGGGLVQPGGSLTLSCVASGSITSSNAMGWYRRAPGKQRELVAGISSDGSHVHQESVKGRFTISRDNAKNSVYLQMNSLRAEDTAVYYCYYFTTVTGSSMSYWGQGTLVTVSS

SEQ ID NO: 408 - protein, 117 aa, synthetic construct
  REGION 1..117: note = Synthetic Construct
EVQLVESGGGLVQPGGSLTLSCAASRYSVSNLSMAWYRQAPGKKRELVAGISADGSTVYVESVKGRFTISRDNAKNSVYLQMNSLRAEDTAVYYCYAYYWTERRPYWGQGTLVTVSS

SEQ ID NO: 409 - protein, 117 aa, synthetic construct
  REGION 1..117: note = Synthetic Construct
EVQLVESGGGLVQPGDSLTLSCAASMSTVSVLSMAWYRQAPGKKRELVAGISSDGSTVYIDSVKGRFTISRDNAKNSVYLQMNSLRAEDTAIYYCYAYSWDDAHPYWGQGTLVTVSS

SEQ ID NO: 410 - protein, 117 aa, synthetic construct
  REGION 1..117: note = Synthetic Construct
EVQLVESGGGLVQPGGSLTLSCAASDSYVSLLSMAWYRQAPGKKRELVAGISVDGSTHYVASVKGRFTISRDNAKNSVYLQMNSLRAEDTAVYYCYAYRWMTRLTYWGQGTLVTVSS

SEQ ID NO: 411 - protein, 117 aa, synthetic construct
  REGION 1..117: note = Synthetic Construct
EVQLVESGGGLVQPGGSLTLSCAASDSAVSVLSIAWYRQAPGKKRELVAGISTDGSKHYIDSVKGRFTISRDNAKNSVYLQMNSLRAEDTAVYYCYAYDWADAQPYWGQGTLVTVSS

SEQ ID NO: 412 - protein, 117 aa, synthetic construct
  REGION 1..117: note = Synthetic Construct
EVQLVESGGGLVQPGGSLTLSCAASHSSVTSLSLAWYRQAPGKKRELVAGISYDGSKYYAESVKGRFTISRDNAKNSVYLQMNSLRAEDTAVYYCYAYSWTDRLPYWGQGTLVTVSS

SEQ ID NO: 413 - protein, 117 aa, synthetic construct
  REGION 1..117: note = Synthetic Construct
EVQLVESGGGLVQPGGSLTLSCAASDSVVKFLSMAWYRQAPGKKRELVAGISANGSRTYMESVKGRFTISRDNAKNSVYLQMNSLRAEDTAVYYCYAYRWATRLPYWGQGTLVTVSS

SEQ ID NO: 414 - protein, 117 aa, synthetic construct
  REGION 1..117: note = Synthetic Construct
EVQLVESGGGLVQPGGSLTLSCAASDPSVWNLSMAWYRQAPGKKRELVAGISPDGSTDYVDSVKGRFTISRDNAKNSVYLQMNSLRAEDTAVYYCYAYKWSNRLPYWGQGTLVTVSS

SEQ ID NO: 415 - protein, 117 aa, synthetic construct
  REGION 1..117: note = Synthetic Construct
EVQLVESGGGLVQPGGSLTLSCAASGTSVMLLSLAWYRQAPGKKRELVAGISPNGSAVYTESVKGRFTISRDNAKNSVYLQMNSLRAEDTAVYYCYAYGWKTRQPYWGQGTLVTVSS

SEQ ID NO: 416 - protein, 117 aa, synthetic construct
  REGION 1..117: note = Synthetic Construct
EVQLVESGGGLVQPGGSLTLSCAASSSPVSNLSLAWYRQAPGKKRELVAGISPDGSTAYMESVKGRFTISRDNAKNSVYLQMNSLRAEDTAVYYCYAYRWPNRRGYWGQGTLVTVSS

SEQ ID NO: 417 - protein, 117 aa, synthetic construct
  REGION 1..117: note = Synthetic Construct
EVQLVESGGGLVQPGGSLTLSCAASWRSVLLLSVAWYRQAPGKKRELVAGISNDGSTDYIDSVKGRFTISRDNAKNSVYLQMNSLRAEDTAVYYCYAYDWTTRQRYWGQGTLVTVSS

SEQ ID NO: 418 - protein, 117 aa, synthetic construct
  REGION 1..117: note = Synthetic Construct
EVQLVESGGGLVQPGGSLTLSCAASSSSVQYLSMAWYRQAPGKKRELVAGISTDGSAVYFDSVKGRFTISRDNAKNSVYLQMNSLRAEDTAVYYCYAYNWSYAQPYWGQGTLVTVSS

SEQ ID NO: 419 - protein, 117 aa, synthetic construct
  REGION 1..117: note = Synthetic Construct
EVQLVESGGGLVQPGGSLTLSCAASGTSVSLLSLAWYRQAPGKKRELVAGISTGGSTHYIESVKGRFTISRDNAKNSVYLQMNSLRAEDTAVYYCYAYNWTDSLQYWGQGTLVTVSS

SEQ ID NO: 420 - protein, 117 aa, synthetic construct
  REGION 1..117: note = Synthetic Construct
EVQLVESGGGLVQPGGSLTLSCAASLSSVSNLSIAWYRQAPGKKRELVAGISTDGSTVYIDSVKGRFTISRDNAKNSVYLQMNSLRAEDTAVYYCYAYSWTTSLPYWGQGTLVTVSS

SEQ ID NO: 421 - protein, 117 aa, synthetic construct
  REGION 1..117: note = Synthetic Construct
EVQLVESGGGLVQPGGSLTLSCAASMYSVSFLSMAWYRQAPGKKRELVAGISNEGSTYYMDSVKGRFTISRDNAKNSVYLQMNSLRAEDTAVYYCYAYKWRSRSTYWGQGTLVTVSS

SEQ ID NO: 422 - protein, 117 aa, synthetic construct
  REGION 1..117: note = Synthetic Construct
EVQLVESGGGLVQPGGSLTLSCAASKSSVSHLSLAWYRQAPGKKRELVAGISADGSHVYTNSVKGRFTISRDNAKNSVYLQMNSLRAEDTAVYYCYAYSQTTRDPYWGQGTLVTVSS

SEQ ID NO: 423 - protein, 117 aa, synthetic construct
  REGION 1..117: note = Synthetic Construct
EVQLVESGGGLVQPGGSLTLSCAASYTSVLDLSIAWYRQAPGKKRELVAGISDDGSRYYTDSVKGRFTISRDNAKNSVYLQMNSLRAEDTAVYYCYAYRWTARDTYWGQGTLVTVSS

SEQ ID NO: 424 - protein, 117 aa, synthetic construct
  REGION 1..117: note = Synthetic Construct
EVQLVESGGGLVQPGGSLTLSCAASMSDVSFLSMAWYRQAPGKKRELVAGISAEGSTLYMESVKGRFTISRDNAKNSVYLQMNSLRAEDTAVYYCYAYRWTSRLSYWGQGTLVTVSS

SEQ ID NO: 425 - protein, 117 aa, synthetic construct
  REGION 1..117: note = Synthetic Construct
EVQLVESGGGLVQPGGSLTLSCAASESSVSFLSSAWYRQAPGKKRELVAGISTDGSTVYIDSVKGRFTISRDNAKNSVYLQMNSLRAEDTAVYYCYAYSWTTRSRYWGQGTLVTVSS

SEQ ID NO: 426 - protein, 117 aa, synthetic construct
  REGION 1..117: note = Synthetic Construct
EVQLVESGGGLVQPGGSLTLSCAASGDSVSLLSMAWYRQAPGKKRELVAGISANGSTSYIDSVKGRFTISRDNAKNSVYLQMNSLRAEDTAVYYCYAYNWTSRYRYWGQGTLVTVSS

SEQ ID NO: 427 - protein, 117 aa, synthetic construct
  REGION 1..117: note = Synthetic Construct
EVQLVESGGGLVQPGGSLTLSCAASGSDVWYLSLAWYRQAPGKKRELVAGISDDGSRHYIESVKGRFTISRDNAKNSVYLQMNSLRAEDTAVYYCYAYSWKTRFPYWGQGTLVTVSS

SEQ ID NO: 428 - protein, 117 aa, synthetic construct
  REGION 1..117: note = Synthetic Construct
EVQLVESGGGLVQPGGSLTLSCAASKSAVAFLSIAWYRQAPGKKRELVAGISPDGSTVYIESVKGRFTISRDNAKNSVYLQMNSLRAEDTAVYYCYAYSWTTRYPYWGQGTLVTVSS

SEQ ID NO: 429 - protein, 117 aa, synthetic construct
  REGION 1..117: note = Synthetic Construct
EVQLVESGGGLVQPGGSLTLSCAASFSAVAYLSMAWYRQAPGKKRELVAGISDDGSTVYVDSVKGRFTISRDNAKNSVYLQMNSLRAEDTAVYYCYAYEWTNALPYWGQGTLVTVSS

SEQ ID NO: 430 - protein, 117 aa, synthetic construct
  REGION 1..117: note = Synthetic Construct
EVQLVESGGGLVQPGGSLTLSCAASVYSVYDLSTAWYRQAPGKKRELVAGISDDGSTVYFDSVKGRFTISRDNAKNSVYLQMNSLRAEDTAVYYCYAYSWITRSPYWGQGTLVTVSS

SEQ ID NO: 431 - protein, 117 aa, synthetic construct
  REGION 1..117: note = Synthetic Construct
EVQLVESGGGLVQPGGSLTLSCAASGDSVSFLSMAWYRQAPGKKRELVAGISDEGSTVYIGSVKGRFTISRDNAKNSVYLQMNSLRAEDTAVYYCYAYSWTTRRQYWGQGTLVTVSS

SEQ ID NO: 432 - protein, 117 aa, synthetic construct
  REGION 1..117: note = Synthetic Construct
EVQLVESGGGLVQPGGSLTLSCAASSSSVSLLSLAWYRQAPGKKRELVAGISDDGSIVYMDSVKGRFTISRDNAKNSVYLQMNSLRAEDTAVYYCYAYSWITRSPYWGQGTLVTVSS

SEQ ID NO: 433 - protein, 117 aa, synthetic construct
  REGION 1..117: note = Synthetic Construct
EVQLVESGGGLVQPGGSLTLSCAASADSVSFLSIAWYRQAPGKKRELVAGISDDGSKHYFDSVKGRFTISRDNAKNSVYLQMNSLRAEDTAVYYCYAYRWEESRQYWGQGTLVTVSS

SEQ ID NO: 434 - protein, 117 aa, synthetic construct
  REGION 1..117: note = Synthetic Construct
EVQLVESGGGLVQPGGSLTLSCAASASSVTLLSIAWYRQAPGKKRELVAGISTDGSTDYLHSVKGRFTISRDNAKNSVYLQMNSLRAEDTAVYYCYAYTWTTRLPYWGQGTLVTVTS

SEQ ID NO: 435 - protein, 117 aa, synthetic construct; identical to SEQ ID NO: 433
  REGION 1..117: note = Synthetic Construct

SEQ ID NO: 436 - protein, 117 aa, synthetic construct
  REGION 1..117: note = Synthetic Construct
EVQLVESGGGLVQPGGSLTLSCAASGTSVWLLSMAWYRQAPGKKRELVAGISYDGSTVYVESVKGRFTISRDNAKNSVYLQMNSLRAEDTAVYYCYAYSWTTRQPYWGQGTLVTVSS

SEQ ID NO: 437 - protein, 117 aa, synthetic construct
  REGION 1..117: note = Synthetic Construct
EVQLVESGGGLVQPGGSLTLSCAASGSSVSILSIAWYRQAPGKKRELVAGISDDGSTVYIDSVKGRFTISRDNAKNSVYLQMNSLRAEDTAVYYCYAYVWGTRLPYWGQGTLVTVSS

SEQ ID NO: 438 - protein, 117 aa, synthetic construct
  REGION 1..117: note = Synthetic Construct
EVQLVESGGGLVQPGGSLTLSCAASGTAVSNLSIAWYRQAPGKKRELVAGISDDGSTVYVDSVKGRFTISRDNAKNSVYLQMNSLRAEDTAVYYCYAYEWTNALPYWGQGTLVTVSS

SEQ ID NO: 439 - protein, 117 aa, synthetic construct
  REGION 1..117: note = Synthetic Construct
EVQLVESGGGLVQPGGSLTLSCAASGSAVSMLSLAWYRQAPGKKRELVAGISDDGSQVYIDSVKGRFTISRDNAKNSVYLQMNSLRAEDTAVYYCYAYRWEDALTYWGQGTLVTVSS

SEQ ID NO: 440 - protein, 117 aa, synthetic construct
  REGION 1..117: note = Synthetic Construct
EVQLVESGGGLVQPGGSLTLSCAASGMTVFFLSMAWYRQAPGKKRELVAGISVDGSTVYSDSVKGRFTISRDNAKNSVYLQMNSLRAEDTAVYYCYAYSWTTRYPYWGQGTLVTVSS

SEQ ID NO: 441 - protein, 117 aa, synthetic construct
  REGION 1..117: note = Synthetic Construct
EVQLVESGGGLVQPGGSLTLSCAASQYSVTFLSVAWYRQAPGKKRELVAGISDDGSNVYIDSVKGRFTISRDNAKNSVYLQMNSLRAEDTAVYYCYAYSWIDSLRYWGQGTLVTVSS

SEQ ID NO: 442 - protein, 117 aa, synthetic construct
  REGION 1..117: note = Synthetic Construct
EVQLVESGGGLVQPGGSLTLSCAASGETVSFLSLAWYRQAPGKKRELVAGISTDGSTVYFVSVKGRFTISRDNAKNSVYLQMNSLRAEDTAVYYCYAYSWTTPRAYWGQGTLVTVSS

SEQ ID NO: 443 - protein, 10 aa, synthetic construct
  REGION 1..10: note = Synthetic Construct
GSIFSIASMG

SEQ ID NO: 444 - protein, 10 aa, synthetic construct
  REGION 1..10: note = Synthetic Construct
GSIFSIASMG

SEQ ID NO: 445 - protein, 10 aa, synthetic construct
  REGION 1..10: note = GSIFSIASMA
GSIFSIASMA

SEQ ID NO: 446 - protein, 10 aa, synthetic construct
  REGION 1..10: note = Synthetic Construct
ESIFSINVMA

SEQ ID NO: 447 - protein, 10 aa, synthetic construct
  REGION 1..10: note = Synthetic Construct
GSSFSITSMA

SEQ ID NO: 448 - protein, 10 aa, synthetic construct
  REGION 1..10: note = Synthetic Construct
SSIFSISSMS

SEQ ID NO: 449 - protein, 10 aa, synthetic construct
  REGION 1..10: note = Synthetic Construct
SSIFSISSMS

SEQ ID NO: 450 - protein, 10 aa, synthetic construct
  REGION 1..10: note = Synthetic Construct
GSTLNIKIMA

SEQ ID NO: 451 - protein, 10 aa, synthetic construct
  REGION 1..10: note = Synthetic Construct
GSTLNIKIMA

SEQ ID NO: 452 - protein, 10 aa, synthetic construct
  REGION 1..10: note = Synthetic Construct
GSTFNIKTMA

SEQ ID NO: 453 - protein, 10 aa, synthetic construct
  REGION 1..10: note = Synthetic Construct
GSTFNIKLMA

SEQ ID NO: 454 - protein, 10 aa, synthetic construct
  REGION 1..10: note = Synthetic Construct
GSTFNFKIMA

SEQ ID NO: 455 - protein, 10 aa, synthetic construct
  REGION 1..10: note = Synthetic Construct
GFMFSSYSMS

SEQ ID NO: 456 - protein, 10 aa, synthetic construct
  REGION 1..10: note = Synthetic Construct
GFMFSSYSMS

SEQ ID NO: 457 - protein, 10 aa, synthetic construct
  REGION 1..10: note = Synthetic Construct
GFTFSSHSMS

SEQ ID NO: 458 - protein, 10 aa, synthetic construct
  REGION 1..10: note = Synthetic Construct
GSSFSHNTMG

SEQ ID NO: 459 - protein, 10 aa, synthetic construct
  REGION 1..10: note = Synthetic Construct
GGRFSYATMG

SEQ ID NO: 460 - protein, 10 aa, synthetic construct
  REGION 1..10: note = Synthetic Construct
GSRFSYATMG

SEQ ID NO: 461 - protein, 10 aa, synthetic construct
  REGION 1..10: note = Synthetic Construct
GSTFTSNVMG

SEQ ID NO: 462 - protein, 10 aa, synthetic construct
  REGION 1..10: note = Synthetic Construct
GSSVSFLSMA

SEQ ID NO: 463 - protein, 10 aa, synthetic construct
  REGION 1..10: note = Synthetic Construct
GSSVSFLSMA

SEQ ID NO: 464 - protein, 10 aa, synthetic construct
  REGION 1..10: note = Synthetic Construct
GSSVSFLSMA

SEQ ID NO: 465 - protein, 10 aa, synthetic construct
  REGION 1..10: note = Synthetic Construct
GSSVSFLSMA

SEQ ID NO: 466 - protein, 10 aa, synthetic construct
  REGION 1..10: note = Synthetic Construct
GSSVSFLSMA

SEQ ID NO: 467 - protein, 10 aa, synthetic construct
  REGION 1..10: note = Synthetic Construct
GSSVSFLSMA

SEQ ID NO: 468 - protein, 10 aa, synthetic construct
  REGION 1..10: note = Synthetic Construct
GSSVSFLSMA

SEQ ID NO: 469 - protein, 10 aa, synthetic construct
  REGION 1..10: note = Synthetic Construct
GSSVSFLSIA

SEQ ID NO: 470 - protein, 10 aa, synthetic construct
  REGION 1..10: note = Synthetic Construct
GSSVSFLSMA

SEQ ID NO: 471 - protein, 10 aa, synthetic construct
  REGION 1..10: note = Synthetic Construct
GSSVSFLSMA

SEQ ID NO: 472 - protein, 10 aa, synthetic construct
  REGION 1..10: note = Synthetic Construct
GSSVSFLSMA

SEQ ID NO: 473 - protein, 10 aa, synthetic construct
  REGION 1..10: note = Synthetic Construct
GSSVSFLSMA

SEQ ID NO: 474 - protein, 10 aa, synthetic construct
  REGION 1..10: note = Synthetic Construct
GSSVSFLSMA

SEQ ID NO: 475 - protein, 10 aa, synthetic construct
  REGION 1..10: note = Synthetic Construct
GSSVSFLSMA

SEQ ID NO: 476 - protein, 10 aa, synthetic construct
  REGION 1..10: note = Synthetic Construct
GFTLDYYAIG

SEQ ID NO: 477 - protein, 10 aa, synthetic construct
  REGION 1..10: note = Synthetic Construct
GSTSSINAMG

SEQ ID NO: 478 - protein, 10 aa, synthetic construct
  REGION 1..10: note = Synthetic Construct
GSTSSINAMG

SEQ ID NO: 479 - protein, 10 aa, synthetic construct
  REGION 1..10: note = Synthetic Construct
GITSSVYSMG

SEQ ID NO: 480 - protein, 10 aa, synthetic construct
  REGION 1..10: note = Synthetic Construct
GRTSMFNSMG

SEQ ID NO: 481 - protein, 10 aa, synthetic construct
  REGION 1..10: note = Synthetic Construct
GRTSMVNSMG

SEQ ID NO: 482 - protein, 10 aa, synthetic construct
  REGION 1..10: note = Synthetic Construct
GSVSMFNSMG

SEQ ID NO: 483 - protein, 10 aa, synthetic construct
  REGION 1..10: note = Synthetic Construct
GSIFSIAVMG

SEQ ID NO: 484 - protein, 10 aa, synthetic construct
  REGION 1..10: note = Synthetic Construct
SGIFSDMSMV

SEQ ID NO: 485 - protein, 10 aa, synthetic construct
  REGION 1..10: note = Synthetic Construct
GSISSIIVMG

SEQ ID NO: 486 - protein, 10 aa, synthetic construct
  REGION 1..10: note = Synthetic Construct
GSISSIIVMG

SEQ ID NO: 487 - protein, 10 aa, synthetic construct
  REGION 1..10: note = Synthetic Construct
GSIFTTNSMG

SEQ ID NO: 488 - protein, 9 aa, synthetic construct
  REGION 1..9: note = Synthetic Construct
GSREISTMG

SEQ ID NO: 489 - protein, 9 aa, synthetic construct
  REGION 1..9: note = Synthetic Construct
GSREISTMG

SEQ ID NO: 490 - protein, 9 aa, synthetic construct
  REGION 1..9: note = Synthetic Construct
GSREISTMG

SEQ ID NO: 491 - protein, 9 aa, synthetic construct
  REGION 1..9: note = Synthetic Construct
GSREISTMG

SEQ ID NO: 492 - protein, 10 aa, synthetic construct
  REGION 1..10: note = Synthetic Construct
GSIFRGAAMY

SEQ ID NO: 493 - protein, 10 aa, synthetic construct
  REGION 1..10: note = Synthetic Construct
GSISSFNFMS

SEQ ID NO: 494 - protein, 10 aa, synthetic construct
  REGION 1..10: note = Synthetic Construct
GTIFTASTMG

SEQ ID NO: 495 - protein, 10 aa, synthetic construct
  REGION 1..10: note = Synthetic Construct
GSIFSIASMG

SEQ ID NO: 496 - protein, 10 aa, synthetic construct
  REGION 1..10: note = Synthetic Construct
GRTSMFNSMG

SEQ ID NO: 497 - protein, 10 aa, synthetic construct
  REGION 1..10: note = Synthetic Construct
GSSVSFLSMA

SEQ ID NO: 498 - protein, 10 aa, synthetic construct
  REGION 1..10: note = Synthetic Construct
GSIFRGAAMY

SEQ ID NO: 499 - protein, 10 aa, synthetic construct
  REGION 1..10: note = Synthetic Construct
GSTFNIKTMA

SEQ ID NO: 500 - protein, 10 aa, synthetic construct
  REGION 1..10: note = Synthetic Construct
GSTLNIKIMA

SEQ ID NO: 501 - protein, 10 aa, synthetic construct
  REGION 1..10: note = Synthetic Construct
SSIFSISSMS

SEQ ID NO: 502 - protein, 10 aa, synthetic construct
  REGION 1..10: note = Synthetic Construct
GSTSSINAMG

SEQ ID NO: 503 - protein, 10 aa, synthetic construct
  REGION 1..10: note = Synthetic Construct
GFMFSSYSMS

SEQ ID NO: 504 - protein, 10 aa, synthetic construct
  REGION 1..10: note = Synthetic Construct
GSVSMFNSMG

SEQ ID NO: 505 - protein, 10 aa, synthetic construct
  REGION 1..10: note = Synthetic Construct
GGRFSYATMG

SEQ ID NO: 506 - protein, 10 aa, synthetic construct
  REGION 1..10: note = Synthetic Construct
GSISSFNFMS

SEQ ID NO: 507 - protein, 10 aa, synthetic construct
  REGION 1..10: note = Synthetic Construct
ESIFSINVMA

SEQ ID NO: 508 - protein, 9 aa, synthetic construct
  REGION 1..9: note = Synthetic Construct
GSREISTMG

SEQ ID NO: 509 - protein, 10 aa, synthetic construct
  REGION 1..10: note = Synthetic Construct
GSIFSIAVMG

SEQ ID NO: 510 - protein, 10 aa, synthetic construct
  REGION 1..10: note = Synthetic Construct
GSTSSINAMG

SEQ ID NO: 511 - protein, 10 aa, synthetic construct
  REGION 1..10: note = Synthetic Construct
SGIFSDMSMV

SEQ ID NO: 512 - protein, 10 aa, synthetic construct
  REGION 1..10: note = Synthetic Construct
GFMFSSYSMS

SEQ ID NO: 513 - protein, 10 aa, synthetic construct
  REGION 1..10: note = Synthetic Construct
GSRFSYATMG

SEQ ID NO: 514 - protein, 10 aa, synthetic construct
  REGION 1..10: note = Synthetic Construct
GSTFTSNVMG

SEQ ID NO: 515 - protein, 10 aa, synthetic construct
  REGION 1..10: note = Synthetic Construct
GSSVSFLSMA

SEQ ID NO: 516 - protein, 10 aa, synthetic construct
  REGION 1..10: note = Synthetic Construct
GSISSIIVMG

SEQ ID NO: 517 - protein, 10 aa, synthetic construct
  REGION 1..10: note = Synthetic Construct
GSSVSFLSMA

SEQ ID NO: 518 - protein, 10 aa, synthetic construct
  REGION 1..10: note = Synthetic Construct
GTIFTASTMG

SEQ ID NO: 519 - protein, 10 aa, synthetic construct
  REGION 1..10: note = Synthetic Construct
GSSVSFLSMA

SEQ ID NO: 520 - protein, 10 aa, synthetic construct
  REGION 1..10: note = Synthetic Construct
GSSFSHNTMG

SEQ ID NO: 521 - protein, 10 aa, synthetic construct
  REGION 1..10: note = Synthetic Construct
GSISSIIVMG

SEQ ID NO: 522 - protein, 10 aa, synthetic construct
  REGION 1..10: note = Synthetic Construct
GSSFSITSMA

SEQ ID NO: 523 - protein, 10 aa, synthetic construct
  REGION 1..10: note = Synthetic Construct
GRTSMVNSMG

SEQ ID NO: 524 - protein, 10 aa, synthetic construct
  REGION 1..10: note = Synthetic Construct
GSTFNFKIMA

SEQ ID NO: 525 - protein, 10 aa, synthetic construct
  REGION 1..10: note = Synthetic Construct
GFTLDYYAIG

SEQ ID NO: 526 - protein, 10 aa, synthetic construct
  REGION 1..10: note = Synthetic Construct
GSIFTTNSMG

SEQ ID NO: 527 - protein, 10 aa, synthetic construct
  REGION 1..10: note = Synthetic Construct
GITSSVYSMG

SEQ ID NO: 528 - protein, 10 aa, synthetic construct
  REGION 1..10: note = Synthetic Construct
SSIFSISSMS

SEQ ID NO: 529 - protein, 10 aa, synthetic construct
  REGION 1..10: note = Synthetic Construct
GFTSSINAMG

SEQ ID NO: 530 - protein, 10 aa, synthetic construct
  REGION 1..10: note = Synthetic Construct
GSTSSINAMA

SEQ ID NO: 531 - protein, 10 aa, synthetic construct
  REGION 1..10: note = Synthetic Construct
GSTSSINAMG

SEQ ID NO: 532 - protein, 10 aa, synthetic construct
  REGION 1..10: note = Synthetic Construct
GSPSSINAMG

SEQ ID NO: 533 - protein, 10 aa, synthetic construct
  REGION 1..10: note = Synthetic Construct
GSTSSINAMG

SEQ ID NO: 534 - protein, 10 aa, synthetic construct
  REGION 1..10: note = Synthetic Construct
GSISSINAMG

SEQ ID NO: 535 - protein, 10 aa, synthetic construct
  REGION 1..10: note = Synthetic Construct
GSTSSINAMA

SEQ ID NO: 536 - protein, 10 aa, synthetic construct
  REGION 1..10: note = Synthetic Construct
GSTSSINAYG

SEQ ID NO: 537 - protein, 10 aa, synthetic construct
  REGION 1..10: note = Synthetic Construct
GSTSSINAIG

SEQ ID NO: 538 - protein, 10 aa, synthetic construct
  REGION 1..10: note = Synthetic Construct
GSTSSINAMA

SEQ ID NO: 539 - protein, 10 aa, synthetic construct
  REGION 1..10: note = Synthetic Construct
GSTSIINAMG

SEQ ID NO: 540 - protein, 10 aa, synthetic construct
  REGION 1..10: note = Synthetic Construct
GSTSSINAMG

SEQ ID NO: 541 - protein, 10 aa, synthetic construct
  REGION 1..10: note = Synthetic Construct
GKTSSINAMA

SEQ ID NO: 542 - protein, 10 aa, synthetic construct
  REGION 1..10: note = Synthetic Construct
GTTSSINAMG

SEQ ID NO: 543 - protein, 10 aa, synthetic construct
  REGION 1..10: note = Synthetic Construct
GSTSSINAMA

SEQ ID NO: 544 - protein, 10 aa, synthetic construct
  REGION 1..10: note = Synthetic Construct
GSGSSINAMG

SEQ ID NO: 545 - protein, 10 aa, synthetic construct
  REGION 1..10: note = Synthetic Construct
GTTSSINAMG

SEQ ID NO: 546 - protein, 10 aa, synthetic construct
  REGION 1..10: note = Synthetic Construct
GSTSSINAMA

SEQ ID NO: 547 - protein, 10 aa, synthetic construct
  REGION 1..10: note = Synthetic Construct
GSTSRINAMG

SEQ ID NO: 548 - protein, 10 aa, synthetic construct
  REGION 1..10: note = Synthetic Construct
GSTSRINAMG

SEQ ID NO: 549 - protein, 10 aa, synthetic construct
  REGION 1..10: note = Synthetic Construct
GSTSSINAMG

SEQ ID NO: 550 - protein, 10 aa, synthetic construct
  REGION 1..10: note = Synthetic Construct
GSTSSINAMA

SEQ ID NO: 551 - protein, 10 aa, synthetic construct
  REGION 1..10: note = Synthetic Construct
GSTSSINAMA

SEQ ID NO: 552 - protein, 10 aa, synthetic construct
  REGION 1..10: note = Synthetic Construct
GNTSSINAMA

SEQ ID NO: 553 - protein, 10 aa, synthetic construct
  REGION 1..10: note = Synthetic Construct
GSTSSINAMA

SEQ ID NO: 554 - protein, 10 aa, synthetic construct
  REGION 1..10: note = Synthetic Construct
GSTSIINAMG

SEQ ID NO: 555 - protein, 10 aa, synthetic construct
  REGION 1..10: note = Synthetic Construct
GSTSSINAMA

SEQ ID NO: 556 - protein, 10 aa, synthetic construct
  REGION 1..10: note = Synthetic Construct
GSTSRINAMG

SEQ ID NO: 557 - protein, 10 aa, synthetic construct
  REGION 1..10: note = Synthetic Construct
GSTSRINAMG

SEQ ID NO: 558 - protein, 10 aa, synthetic construct
  REGION 1..10: note = Synthetic Construct
GTTSSINAMG

SEQ ID NO: 559 - protein, 10 aa, synthetic construct
  REGION 1..10: note = Synthetic Construct
GITSSINAMG

SEQ ID NO: 560 - protein, 10 aa, synthetic construct
  REGION 1..10: note = Synthetic Construct
GSTSDINAMG

SEQ ID NO: 561 - protein, 10 aa, synthetic construct
  REGION 1..10: note = Synthetic Construct
GSTSSINAMA

SEQ ID NO: 562 - protein, 10 aa, synthetic construct
  REGION 1..10: note = Synthetic Construct
GSTSSINAIG

SEQ ID NO: 563 - protein, 10 aa, synthetic construct
  REGION 1..10: note = Synthetic Construct
GSTSSKNAMG

SEQ ID NO: 564 - protein, 10 aa, synthetic construct
  REGION 1..10: note = Synthetic Construct
GSTSSINAMG

SEQ ID NO: 565 - protein, 10 aa, synthetic construct
  REGION 1..10: note = Synthetic Construct
GLTSSINAMG

SEQ ID NO: 566 - protein, 10 aa, synthetic construct
  REGION 1..10: note = Synthetic Construct
GSTSSINAMA

SEQ ID NO: 567 - protein, 10 aa, synthetic construct
  REGION 1..10: note = Synthetic Construct
GSTSSNNAMA

SEQ ID NO: 568 - protein, 10 aa, synthetic construct
  REGION 1..10: note = Synthetic Construct
GSTSSINAMA

SEQ ID NO: 569 - protein, 10 aa, synthetic construct
  REGION 1..10: note = Synthetic Construct
GSTSHINAMG

SEQ ID NO: 570 - protein, 10 aa, synthetic construct
  REGION 1..10: note = Synthetic Construct
GQTSSINAMG

SEQ ID NO: 571 - protein, 10 aa, synthetic construct
  REGION 1..10: note = Synthetic Construct
GSTSRINGMG

SEQ ID NO: 572 - protein, 10 aa, synthetic construct
  REGION 1..10: note = Synthetic Construct
GSTSVINAMA

SEQ ID NO: 573 - protein, 10 aa, synthetic construct
  REGION 1..10: note = Synthetic Construct
GSTSSINAMA

SEQ ID NO: 574 - protein, 10 aa, synthetic construct
  REGION 1..10: note = Synthetic Construct
GKTSSINAMG

SEQ ID NO: 575 - protein, 10 aa, synthetic construct
  REGION 1..10: note = Synthetic Construct
GSTSSINAMA

SEQ ID NO: 576 - protein, 10 aa, synthetic construct
  REGION 1..10: note = Synthetic Construct
GSVSSINAMG

SEQ ID NO: 577 - protein, 10 aa, synthetic construct
  REGION 1..10: note = Synthetic Construct
GNTSSINAMG

SEQ ID NO: 578 - protein, 10 aa, synthetic construct
  REGION 1..10: note = Synthetic Construct
GSTSSTNAMG

SEQ ID NO: 579 - protein, 10 aa, synthetic construct
  REGION 1..10: note = Synthetic Construct
GSTSSINAMG

SEQ ID NO: 580 - protein, 10 aa, synthetic construct
  REGION 1..10: note = Synthetic Construct
GSTSSINAMA

SEQ ID NO: 581 - protein, 10 aa, synthetic construct
  REGION 1..10: note = Synthetic Construct
GGTSSINAMG

SEQ ID NO: 582 - protein, 10 aa, synthetic construct
  REGION 1..10: note = Synthetic Construct
GSTRSINAMG

SEQ ID NO: 583 - protein, 10 aa, synthetic construct
  REGION 1..10: note = Synthetic Construct
GTTSSINAMG

SEQ ID NO: 584 - protein, 10 aa, synthetic construct
  REGION 1..10: note = Synthetic Construct
GSTSSINAMG

SEQ ID NO: 585 - protein, 10 aa, synthetic construct
  REGION 1..10: note = Synthetic Construct
GSTSSINAMA

SEQ ID NO: 586 - protein, 10 aa, synthetic construct
  REGION 1..10: note = Synthetic Construct
GNTSSINAMG

SEQ ID NO: 587 - protein, 10 aa, synthetic construct
  REGION 1..10: note = Synthetic Construct
GSTSRINAMG

SEQ ID NO: 588 - protein, 10 aa, synthetic construct
  REGION 1..10: note = Synthetic Construct
GSTSSINAIG

SEQ ID NO: 589 - protein, 10 aa, synthetic construct
  REGION 1..10: note = Synthetic Construct
GLTSSINAMG

SEQ ID NO: 590 - protein, 10 aa, synthetic construct
  REGION 1..10: note = Synthetic Construct
GSTSSINAMA

SEQ ID NO: 591 - protein, 10 aa, synthetic construct
  REGION 1..10: note = Synthetic Construct
GSTSSTNAMG

SEQ ID NO: 592 - protein, 10 aa, synthetic construct
  REGION 1..10: note = Synthetic Construct
GSTSSINAIG

SEQ ID NO: 593 - protein, 10 aa, synthetic construct
  REGION 1..10: note = Synthetic Construct
GSTSSINAIG

SEQ ID NO: 594 - protein, 10 aa, synthetic construct
  REGION 1..10: note = Synthetic Construct
GSTSSINAMG

SEQ ID NO: 595 - protein, 10 aa, synthetic construct
  REGION 1..10: note = Synthetic Construct
GSTSSINAMG

SEQ ID NO: 596 - protein, 10 aa, synthetic construct
  REGION 1..10: note = Synthetic Construct
GSTSSINAMA

SEQ ID NO: 597 - protein, 10 aa, synthetic construct
  REGION 1..10: note = Synthetic Construct
GSTSSINAMA

SEQ ID NO: 598 - protein, 10 aa, synthetic construct
  REGION 1..10: note = Synthetic Construct
GSKSSINAMG

SEQ ID NO: 599 - protein, 10 aa, synthetic construct
  REGION 1..10: note = Synthetic Construct
GTTSSINAMG

SEQ ID NO: 600 - protein, 10 aa, synthetic construct
  REGION 1..10: note = Synthetic Construct
GSTSSINAFG

SEQ ID NO: 601 - protein, 10 aa, synthetic construct
  REGION 1..10: note = Synthetic Construct
GSTFSINAMG

SEQ ID NO: 602 - protein, 10 aa, synthetic construct
  REGION 1..10: note = Synthetic Construct
GSTRSINAMG

SEQ ID NO: 603 - protein, 10 aa, synthetic construct
  REGION 1..10: note = Synthetic Construct
GSTSSINAIG

SEQ ID NO: 604 - protein, 10 aa, synthetic construct
  REGION 1..10: note = Synthetic Construct
GSTSSINAMG

SEQ ID NO: 605 - protein, 10 aa, synthetic construct
  REGION 1..10: note = Synthetic Construct
GSTSSINAMG

SEQ ID NO: 606 - protein, 10 aa, synthetic construct
  REGION 1..10: note = Synthetic Construct
GTTSSINAMG

SEQ ID NO: 607 - protein, 10 aa, synthetic construct
  REGION 1..10: note = Synthetic Construct
GSTSSINAMA

SEQ ID NO: 608 - protein, 10 aa, synthetic construct
  REGION 1..10: note = Synthetic Construct
GRTSSINAMG

SEQ ID NO: 609 - protein, 10 aa, synthetic construct
  REGION 1..10: note = Synthetic Construct
GSTSSRNAMG

SEQ ID NO: 610 - protein, 10 aa, synthetic construct
  REGION 1..10: note = Synthetic Construct
GSTKSINAMG

SEQ ID NO: 611 - protein, 10 aa, synthetic construct
  REGION 1..10: note = Synthetic Construct
GSTSSRNAMG

SEQ ID NO: 612 - protein, 10 aa, synthetic construct
  REGION 1..10: note = Synthetic Construct
GSTSSINAIG

SEQ ID NO: 613 - protein, 10 aa, synthetic construct
  REGION 1..10: note = Synthetic Construct
GSTSLINAMG

SEQ ID NO: 614 - protein, 10 aa, synthetic construct
  REGION 1..10: note = Synthetic Construct
GSTSSINAMA

SEQ ID NO: 615 - protein, 10 aa, synthetic construct
  REGION 1..10: note = Synthetic Construct
GSTSSINAMG

SEQ ID NO: 616 - protein, 10 aa, synthetic construct
  REGION 1..10: note = Synthetic Construct
GTTSSINAMG

SEQ ID NO: 617 - protein, 10 aa, synthetic construct
  REGION 1..10: note = Synthetic Construct
GSTSSINAFG

SEQ ID NO: 618 - protein, 10 aa, synthetic construct
  REGION 1..10: note = Synthetic Construct
GSTSSRNAMG

SEQ ID NO: 619 - protein, 10 aa, synthetic construct
  REGION 1..10: note = Synthetic Construct
GNTSSINAMG

SEQ ID NO: 620 - protein, 10 aa, synthetic construct
  REGION 1..10: note = Synthetic Construct
GTTSSINAMG

SEQ ID NO: 621 - protein, 10 aa, synthetic construct
  REGION 1..10: note = Synthetic Construct
GSTASINAMG

SEQ ID NO: 622 - protein, 10 aa, synthetic construct
  REGION 1..10: note = Synthetic Construct
GSTSSINAVG

SEQ ID NO: 623 - protein, 10 aa, synthetic construct
  REGION 1..10: note = Synthetic Construct
GSTSSRNAMG

SEQ ID NO: 624 - protein, 10 aa, synthetic construct
  REGION 1..10: note = Synthetic Construct
GSTNSINAMG

SEQ ID NO: 625 - protein, 10 aa, synthetic construct
  REGION 1..10: note = Synthetic Construct
GSTSSINAMA

SEQ ID NO: 626 - protein, 10 aa, synthetic construct
  REGION 1..10: note = Synthetic Construct
GSTSRINAMG

SEQ ID NO: 627 - protein, 10 aa, synthetic construct
  REGION 1..10: note = Synthetic Construct
GSTSNINAMG

SEQ ID NO: 628 - protein, 10 aa, synthetic construct
  REGION 1..10: note = Synthetic Construct
GSTSKINAMG

SEQ ID NO: 629 - protein, 10 aa, synthetic construct
  REGION 1..10: note = Synthetic Construct
GSTSSINALG

SEQ ID NO: 630 - protein, 10 aa, synthetic construct
  REGION 1..10: note = Synthetic Construct
GKTSSINAMG

SEQ ID NO: 631 - protein, 10 aa, synthetic construct
  REGION 1..10: note = Synthetic Construct
GSTSSINAVG

SEQ ID NO: 632 - protein, 10 aa, synthetic construct
  REGION 1..10: note = Synthetic Construct
GSTSRINAMG

SEQ ID NO: 633 - protein, 10 aa, synthetic construct
  REGION 1..10: note = Synthetic Construct
GSTSSINAMG

SEQ ID NO: 634 - protein, 10 aa, synthetic construct
  REGION 1..10: note = Synthetic Construct
GSTSSINAVG

SEQ ID NO: 635 - protein, 10 aa, synthetic construct
  REGION 1..10: note = Synthetic Construct
GTTSSINAMG

SEQ ID NO: 636 - protein, 10 aa, synthetic construct
  REGION 1..10: note = Synthetic Construct
GSTSSINAMG

SEQ ID NO: 637 - protein, 10 aa, synthetic construct
  REGION 1..10: note = Synthetic Construct
GTTSSINAMG

SEQ ID NO: 638 - protein, 10 aa, synthetic construct
  REGION 1..10: note = Synthetic Construct
GKTSSINAMG

SEQ ID NO: 639 - protein, 10 aa, synthetic construct
  REGION 1..10: note = Synthetic Construct
GSTSSINAMG

SEQ ID NO: 640 - protein, 10 aa, synthetic construct
  REGION 1..10: note = Synthetic Construct
GSTSAINAMG

SEQ ID NO: 641 - protein, 10 aa, synthetic construct
  REGION 1..10: note = Synthetic Construct
GSPSSINAYG

SEQ ID NO: 642 - protein, 10 aa, synthetic construct
  REGION 1..10: note = Synthetic Construct
GSTSSINAMG

SEQ ID NO: 643 - protein, 10 aa, synthetic construct
  REGION 1..10: note = Synthetic Construct
GSRSSINAMG

SEQ ID NO: 644 - protein, 10 aa, synthetic construct
  REGION 1..10: note = Synthetic Construct
GSVSSINAMG

SEQ ID NO: 645 - protein, 10 aa, synthetic construct
  REGION 1..10: note = Synthetic Construct
GSTSSINAMA

SEQ ID NO: 646 - protein, 10 aa, synthetic construct
  REGION 1..10: note = Synthetic Construct
GSTSSINAIG

SEQ ID NO: 647 - protein, 10 aa, synthetic construct
  REGION 1..10: note = Synthetic Construct
GSTSSINAMG

SEQ ID NO: 648 - protein, 10 aa, synthetic construct
  REGION 1..10: note = Synthetic Construct
GSTSSINAVG

SEQ ID NO: 649 - protein, 10 aa, synthetic construct
  REGION 1..10: note = Synthetic Construct
GSTSSINAMA

SEQ ID NO: 650 - protein, 10 aa, synthetic construct
  REGION 1..10: note = Synthetic Construct
GSTSSINAYG

SEQ ID NO: 651 - protein, 10 aa, synthetic construct
  REGION 1..10: note = Synthetic Construct
GSTSSINAVG

SEQ ID NO: 652 - protein, 10 aa, synthetic construct
  REGION 1..10: note = Synthetic Construct
GSKSSINAMG

SEQ ID NO: 653 - protein, 10 aa, synthetic construct
  REGION 1..10: note = Synthetic Construct
GSTSSINAMA

SEQ ID NO: 654 - protein, 10 aa, synthetic construct
  REGION 1..10: note = Synthetic Construct
GSVSSINAMG

SEQ ID NO: 655 - protein, 10 aa, synthetic construct
  REGION 1..10: note = Synthetic Construct
GSTSSINAMG

SEQ ID NO: 656 - protein, 10 aa, synthetic construct
  REGION 1..10: note = Synthetic Construct
GSTSSINAMG

SEQ ID NO: 657 - protein, 10 aa, synthetic construct
  REGION 1..10: note = Synthetic Construct
GSTSSINAMA

SEQ ID NO: 658 - protein, 10 aa, synthetic construct
  REGION 1..10: note = Synthetic Construct
GSTSYINAMG

SEQ ID NO: 659 - protein, 10 aa, synthetic construct
  REGION 1..10: note = Synthetic Construct
GSTSSINAMG

SEQ ID NO: 660 - protein, 10 aa, synthetic construct
  REGION 1..10: note = Synthetic Construct
GSTSSINAMG

SEQ ID NO: 661 - protein, 10 aa, synthetic construct
  REGION 1..10: note = Synthetic Construct
GSTSSINAMG

SEQ ID NO: 662 - protein, 10 aa, synthetic construct
  REGION 1..10: note = Synthetic Construct
GSTSRINAMG

SEQ ID NO: 663 - protein, 10 aa, synthetic construct
  REGION 1..10: note = Synthetic Construct
GSTSSINAMA

SEQ ID NO: 664 - protein, 10 aa, synthetic construct
  REGION 1..10: note = Synthetic Construct
GSTSSINAMA

SEQ ID NO: 665 - protein, 10 aa, synthetic construct
  REGION 1..10: note = Synthetic Construct
GSTSSINAMG

SEQ ID NO: 666 - protein, 10 aa, synthetic construct
  REGION 1..10: note = Synthetic Construct
GSTSTINAMG

SEQ ID NO: 667 - protein, 10 aa, synthetic construct
  REGION 1..10: note = Synthetic Construct
GSTSSINAVG

SEQ ID NO: 668 - protein, 10 aa, synthetic construct
  REGION 1..10: note = Synthetic Construct
GSTSSINAMG

SEQ ID NO: 669 - protein, 10 aa, synthetic construct
  REGION 1..10: note = Synthetic Construct
GSPSSINAYG

SEQ ID NO: 670 - protein, 10 aa, synthetic construct
  REGION 1..10: note = Synthetic Construct
GSPSSINAYG

SEQ ID NO: 671 - protein, 10 aa, synthetic construct
  REGION 1..10: note = Synthetic Construct
GSSVKFLSMA

SEQ ID NO: 672 - protein, 10 aa, synthetic construct
  REGION 1..10: note = Synthetic Construct
GSSVSFLSLA

SEQ ID NO: 673 - protein, 10 aa, synthetic construct
  REGION 1..10: note = Synthetic Construct
GSRVSFLSMA

SEQ ID NO: 674 - protein, 10 aa, synthetic construct
  REGION 1..10: note = Synthetic Construct
GSQVSFLSMA

SEQ ID NO: 675 - protein, 10 aa, synthetic construct
  REGION 1..10: note = Synthetic Construct
GSSVSFLSMA

SEQ ID NO: 676 - protein, 10 aa, synthetic construct
  REGION 1..10: note = Synthetic Construct
GSKVSFLSMA

SEQ ID NO: 677 - protein, 10 aa, synthetic construct
  REGION 1..10: note = Synthetic Construct
GSSVGFLSMA

SEQ ID NO: 678 - protein, 10 aa, synthetic construct
  REGION 1..10: note = Synthetic Construct
GSSVSFLSMA

SEQ ID NO: 679 - protein, 10 aa, synthetic construct
  REGION 1..10: note = Synthetic Construct
GSRVSFLSMA

SEQ ID NO: 680 - protein, 10 aa, synthetic construct
  REGION 1..10: note = Synthetic Construct
GSSVSFLSLA

SEQ ID NO: 681 - protein, 10 aa, synthetic construct
  REGION 1..10: note = Synthetic Construct
GSSVSFLSMA

SEQ ID NO: 682 - protein, 10 aa, synthetic construct
  REGION 1..10: note = Synthetic Construct
GSSVQFLSMA

SEQ ID NO: 683 - protein, 10 aa, synthetic construct
  REGION 1..10: note = Synthetic Construct
GSNVSFLSMA

SEQ ID NO: 684 - protein, 10 aa, synthetic construct
  REGION 1..10: note = Synthetic Construct
GSSVKFLSMA

SEQ ID NO: 685 - protein, 10 aa, synthetic construct
  REGION 1..10: note = Synthetic Construct
GKSVSFLSMA

SEQ ID NO: 686 - protein, 10 aa, synthetic construct
  REGION 1..10: note = Synthetic Construct
GSRVSFLSMA

SEQ ID NO: 687 - protein, 10 aa, synthetic construct
  REGION 1..10: note = Synthetic Construct
GSHVSFLSMA

SEQ ID NO: 688 - protein, 10 aa, synthetic construct
  REGION 1..10: note = Synthetic Construct
GSSVSFLSMA

SEQ ID NO: 689 - protein, 10 aa, synthetic construct
  REGION 1..10: note = Synthetic Construct
GSSVSFLSMA

SEQ ID NO: 690 - protein, 10 aa, synthetic construct
  REGION 1..10: note = Synthetic Construct
GSSVRFLSMA

SEQ ID NO: 691 - protein, 10 aa, synthetic construct
  REGION 1..10: note = Synthetic Construct
GSSVRFLSMA

SEQ ID NO: 692 - protein, 10 aa, synthetic construct
  REGION 1..10: note = Synthetic Construct
GSSVRFLSMA

SEQ ID NO: 693 - protein, 10 aa, synthetic construct
  REGION 1..10: note = Synthetic Construct
GSHVSFLSMA

SEQ ID NO: 694 - protein, 10 aa, synthetic construct
  REGION 1..10: note = Synthetic Construct
GTSVSFLSMA

SEQ ID NO: 695 - protein, 10 aa, synthetic construct
  REGION 1..10: note = Synthetic Construct
GTSVSFLSIA

SEQ ID NO: 696 - protein, 10 aa, synthetic construct
  REGION 1..10: note = Synthetic Construct
GSSVKFLSMA

SEQ ID NO: 697 - protein, 10 aa, synthetic construct
  REGION 1..10: note = Synthetic Construct
GSSVSFLSMA

SEQ ID NO: 698 - protein, 10 aa, synthetic construct
  REGION 1..10: note = Synthetic Construct
GSSVRFLSMA

SEQ ID NO: 699 - protein, 10 aa, synthetic construct
  REGION 1..10: note = Synthetic Construct
GSSVSFLSMA

SEQ ID NO: 700 - protein, 10 aa, synthetic construct
  REGION 1..10: note = Synthetic Construct
GSSVRFLSMA

SEQ ID NO: 701 - protein, 10 aa, synthetic construct
  REGION 1..10: note = Synthetic Construct
GSSVVFLSMA

SEQ ID NO: 702 - protein, 10 aa, synthetic construct
  REGION 1..10: note = Synthetic Construct
GSSVRFLSMA

SEQ ID NO: 703 - protein, 10 aa, synthetic construct
  REGION 1..10: note = Synthetic Construct
GSSVRFLSMA

SEQ ID NO: 704 - protein, 10 aa, synthetic construct
  REGION 1..10: note = Synthetic Construct
GSSVRFLSMA

SEQ ID NO: 705 - protein, 10 aa, synthetic construct
  REGION 1..10: note = Synthetic Construct
GSSVSRLSMA

SEQ ID NO: 706 - protein, 10 aa, synthetic construct
  REGION 1..10: note = Synthetic Construct
GSSKSFLSMA

SEQ ID NO: 707 - protein, 10 aa, synthetic construct
  REGION 1..10: note = Synthetic Construct
GSSVSRLSMA

SEQ ID NO: 708 - protein, 10 aa, synthetic construct
  REGION 1..10: note = Synthetic Construct
GSSVKFLSMA

SEQ ID NO: 709 - protein, 10 aa, synthetic construct
  REGION 1..10: note = Synthetic Construct
GSGVRFLSMA

SEQ ID NO: 710 - protein, 10 aa, synthetic construct
  REGION 1..10: note = Synthetic Construct
GSSVRFLSMA

SEQ ID NO: 711 - protein, 10 aa, synthetic construct
  REGION 1..10: note = Synthetic Construct
GSSVHFLSMA

SEQ ID NO: 712 - protein, 10 aa, synthetic construct
  REGION 1..10: note = Synthetic Construct
GSSVRFLSMA

SEQ ID NO: 713 - protein, 10 aa, synthetic construct
  REGION 1..10: note = Synthetic Construct
GSKVSFLSMA

SEQ ID NO: 714 - protein, 10 aa, synthetic construct
  REGION 1..10: note = Synthetic Construct
GSSVSFLSMA

SEQ ID NO: 715 - protein, 10 aa, synthetic construct
  REGION 1..10: note = Synthetic Construct
GSKVSFLSMA

SEQ ID NO: 716 - protein, 10 aa, synthetic construct
  REGION 1..10: note = Synthetic Construct
GSRVSFLSMA

SEQ ID NO: 717 - protein, 10 aa, synthetic construct
  REGION 1..10: note = Synthetic Construct
GSRVSFLSMA

SEQ ID NO: 718 - protein, 10 aa, synthetic construct
  REGION 1..10: note = Synthetic Construct
GSSVRFLSMA

SEQ ID NO: 719 - protein, 10 aa, synthetic construct
  REGION 1..10: note = Synthetic Construct
YSSVSRLSMA

SEQ ID NO: 720 - protein, 10 aa, synthetic construct
  REGION 1..10: note = Synthetic Construct
GSSVSFLSMA

SEQ ID NO: 721 - protein, 10 aa, synthetic construct
  REGION 1..10: note = Synthetic Construct
GSSVSFLSMA

SEQ ID NO: 722 - protein, 10 aa, synthetic construct
  REGION 1..10: note = Synthetic Construct
GSSVSFLSMA

SEQ ID NO: 723 - protein, 10 aa, synthetic construct
  REGION 1..10: note = Synthetic Construct
GTSVSFLSMA

SEQ ID NO: 724 - protein, 10 aa, synthetic construct
  REGION 1..10: note = Synthetic Construct
GSSVKFLSMA

SEQ ID NO: 725 - protein, 10 aa, synthetic construct
  REGION 1..10: note = Synthetic Construct
GSSVSFLSMA

SEQ ID NO: 726 - protein, 10 aa, synthetic construct
  REGION 1..10: note = Synthetic Construct
GSRVSFLSMA

SEQ ID NO: 727 - protein, 10 aa, synthetic construct
  REGION 1..10: note = Synthetic Construct
GSSVSVLSMA

SEQ ID NO: 728 - protein, 10 aa, synthetic construct
  REGION 1..10: note = Synthetic Construct
GSSVSFLSMA

SEQ ID NO: 729 - protein, 10 aa, synthetic construct
  REGION 1..10: note = Synthetic Construct
GSRVSFLSMA

SEQ ID NO: 730 - protein, 10 aa, synthetic construct
  REGION 1..10: note = Synthetic Construct
GSSVKFLSMA

SEQ ID NO: 731 - protein, 10 aa, synthetic construct
  REGION 1..10: note = Synthetic Construct
GSSVRFLSMA

SEQ ID NO: 732 - protein, 10 aa, synthetic construct
  REGION 1..10: note = Synthetic Construct
GSSVSQLSMA

SEQ ID NO: 733 - protein, 10 aa, synthetic construct
  REGION 1..10: note = Synthetic Construct
GSRVSFLSMA

SEQ ID NO: 734 - protein, 10 aa, synthetic construct
  REGION 1..10: note = Synthetic Construct
KSSVSFLSMA

SEQ ID NO: 735 - protein, 10 aa, synthetic construct
  REGION 1..10: note = Synthetic Construct
GSSVSFLSMA

SEQ ID NO: 736 - protein, 10 aa, synthetic construct
  REGION 1..10: note = Synthetic Construct
GSSVKFLSMA

SEQ ID NO: 737 - protein, 10 aa, synthetic construct
  REGION 1..10: note = Synthetic Construct
GSSVRFLSMA

SEQ ID NO: 738 - protein, 10 aa, synthetic construct
  REGION 1..10: note = Synthetic Construct
GSSVRFLSMA

SEQ ID NO: 739 - protein, 10 aa, synthetic construct
  REGION 1..10: note = Synthetic Construct
GSRVSFLSMA

SEQ ID NO: 740 - protein, 10 aa, synthetic construct
  REGION 1..10: note = Synthetic Construct
GSSVSFLSLA

SEQ ID NO: 741 - protein, 10 aa, synthetic construct
  REGION 1..10: note = Synthetic Construct
GSSVRFLSMA

SEQ ID NO: 742 - protein, 10 aa, synthetic construct
  REGION 1..10: note = Synthetic Construct
GSKVSFLSMA

SEQ ID NO: 743 - protein, 10 aa, synthetic construct
  REGION 1..10: note = Synthetic Construct
GSSVSFLSMA

SEQ ID NO: 744 - protein, 10 aa, synthetic construct
  REGION 1..10: note = Synthetic Construct
GSSVRFLSMA

SEQ ID NO: 745 - protein, 10 aa, synthetic construct
  REGION 1..10: note = Synthetic Construct
GSKVSFLSMA

SEQ ID NO: 746 - protein, 10 aa, synthetic construct
  REGION 1..10: note = Synthetic Construct
GSSVKFLSMA

SEQ ID NO: 747 - protein, 10 aa, synthetic construct
  REGION 1..10: note = Synthetic Construct
GSSVKFLSMA

SEQ ID NO: 748 - protein, 10 aa, synthetic construct
  REGION 1..10: note = Synthetic Construct
GSRVSFLSMA

SEQ ID NO: 749 - protein, 10 aa, synthetic construct
  REGION 1..10: note = Synthetic Construct
GSSVLFLSMA

SEQ ID NO: 750 - protein, 10 aa, synthetic construct
  REGION 1..10: note = Synthetic Construct
GSRVSFLSMA

SEQ ID NO: 751 - protein, 10 aa, synthetic construct
  REGION 1..10: note = Synthetic Construct
GSRVSFLSMA

SEQ ID NO: 752 - protein, 10 aa, synthetic construct
  REGION 1..10: note = Synthetic Construct
GSSVGFLSMA

SEQ ID NO: 753 - protein, 10 aa, synthetic construct
  REGION 1..10: note = Synthetic Construct
GSSVSFMSMA

SEQ ID NO: 754 - protein, 10 aa, synthetic construct
  REGION 1..10: note = Synthetic Construct
GSSVSFLSMA

SEQ ID NO: 755 - protein, 10 aa, synthetic construct
  REGION 1..10: note = Synthetic Construct
GSSVTFLSMA

SEQ ID NO: 756 - protein, 10 aa, synthetic construct
  REGION 1..10: note = Synthetic Construct
GSSVRFLSMA

SEQ ID NO: 757 - protein, 10 aa, synthetic construct
  REGION 1..10: note = Synthetic Construct
GSKVSFLSMA

SEQ ID NO: 758 - protein, 10 aa, synthetic construct
  REGION 1..10: note = Synthetic Construct
GSKVSFMSMA

SEQ ID NO: 759 - protein, 10 aa, synthetic construct
  REGION 1..10: note = Synthetic Construct
GSSVSNLSMA

SEQ ID NO: 760 - protein, 10 aa, synthetic construct
  REGION 1..10: note = Synthetic Construct
NSSVSKLSMA

SEQ ID NO: 761 - protein, 10 aa, synthetic construct
  REGION 1..10: note = Synthetic Construct
GSKVSFLSMA

SEQ ID NO: 762 - protein, 10 aa, synthetic construct
  REGION 1..10: note = Synthetic Construct
GSQVSFLSMA

SEQ ID NO: 763 - protein, 10 aa, synthetic construct
  REGION 1..10: note = Synthetic Construct
GSKVSFMSMA

SEQ ID NO: 764 - protein, 10 aa, synthetic construct
  REGION 1..10: note = Synthetic Construct
GSRVSFLSMA

SEQ ID NO: 765 - protein, 10 aa, synthetic construct
  REGION 1..10: note = Synthetic Construct
GSSVRFLSMA

SEQ ID NO: 766 - protein, 10 aa, synthetic construct
  REGION 1..10: note = Synthetic Construct
GSKVSFLSMA

SEQ ID NO: 767 - protein, 10 aa, synthetic construct
  REGION 1..10: note = Synthetic Construct
GSSVRFLSMA

SEQ ID NO: 768 - protein, 10 aa, synthetic construct
  REGION 1..10: note = Synthetic Construct
GSSVSFLSIA

SEQ ID NO: 769 - protein, 10 aa, synthetic construct
  REGION 1..10: note = Synthetic Construct
GSSSSFLSMA

SEQ ID NO: 770 - protein, 10 aa, synthetic construct
  REGION 1..10: note = Synthetic Construct
GSSVKFLSMA

SEQ ID NO: 771 - protein, 10 aa, synthetic construct
  REGION 1..10: note = Synthetic Construct
GSSVNFLSMA

SEQ ID NO: 772 - protein, 10 aa, synthetic construct
  REGION 1..10: note = Synthetic Construct
GSSVKFLSMA

SEQ ID NO: 773 - protein, 10 aa, synthetic construct
  REGION 1..10: note = Synthetic Construct
GSSVSFLSMA

SEQ ID NO: 774 - protein, 10 aa, synthetic construct
  REGION 1..10: note = Synthetic Construct
GSSVRFLSMA

SEQ ID NO: 775 - protein, 10 aa, synthetic construct
  REGION 1..10: note = Synthetic Construct
GSSVSFLSVA

SEQ ID NO: 776 - protein, 10 aa, synthetic construct
  REGION 1..10: note = Synthetic Construct
GSQVSFLSMA

SEQ ID NO: 777 - protein, 10 aa, synthetic construct
  REGION 1..10: note = Synthetic Construct
GTSVSFLSMA

SEQ ID NO: 778 - protein, 10 aa, synthetic construct
  REGION 1..10: note = Synthetic Construct
GSRVSFLSMA

SEQ ID NO: 779 - protein, 10 aa, synthetic construct
  REGION 1..10: note = Synthetic Construct
GSSVKFLSMA

SEQ ID NO: 780 - protein, 10 aa, synthetic construct
  REGION 1..10: note = Synthetic Construct
GSSVSFLSSA

SEQ ID NO: 781 - protein, 10 aa, synthetic construct
  REGION 1..10: note = Synthetic Construct
GSSVKFLSMA

SEQ ID NO: 782 - protein, 10 aa, synthetic construct
  REGION 1..10: note = Synthetic Construct
GSSVSFLSMA

SEQ ID NO: 783 - protein, 10 aa, synthetic construct
  REGION 1..10: note = Synthetic Construct
GSTVSFLSMA

SEQ ID NO: 784 - protein, 10 aa, synthetic construct
  REGION 1..10: note = Synthetic Construct
GSSVQFLSMA

SEQ ID NO: 785 - protein, 10 aa, synthetic construct
  REGION 1..10: note = Synthetic Construct
RSSVSFLSMA

SEQ ID NO: 786 - protein, 10 aa, synthetic construct
  REGION 1..10: note = Synthetic Construct
GSKVSFLSMA

SEQ ID NO: 787 - protein, 10 aa, synthetic construct
  REGION 1..10: note = Synthetic Construct
GSRVSFLSMA

SEQ ID NO: 788 - protein, 10 aa, synthetic construct
  REGION 1..10: note = Synthetic Construct
GSSVSFLSMA

SEQ ID NO: 789 - protein, 10 aa, synthetic construct
  REGION 1..10: note = Synthetic Construct
GSKVSFLSMA

SEQ ID NO: 790 - protein, 10 aa, synthetic construct
  REGION 1..10: note = Synthetic Construct
GSSVRFLSMA

SEQ ID NO: 791 - protein, 10 aa, synthetic construct
  REGION 1..10: note = Synthetic Construct
GSSVKFLSMA

SEQ ID NO: 792 - protein, 10 aa, synthetic construct
  REGION 1..10: note = Synthetic Construct
GSSVKFLSMA

SEQ ID NO: 793 - protein, 10 aa, synthetic construct
  REGION 1..10: note = Synthetic Construct
GSSVSILSMA

SEQ ID NO: 794 - protein, 10 aa, synthetic construct
  REGION 1..10: note = Synthetic Construct
GSSVSFLSVA

SEQ ID NO: 795 - protein, 10 aa, synthetic construct
  REGION 1..10: note = Synthetic Construct
GSSVRFLSMA

SEQ ID NO: 796 - protein, 10 aa, synthetic construct
  REGION 1..10: note = Synthetic Construct
GSRVSFLSMA

SEQ ID NO: 797 - protein, 10 aa, synthetic construct
  REGION 1..10: note = Synthetic Construct
GHSVSFLSMA

SEQ ID NO: 798 - protein, 10 aa, synthetic construct
  REGION 1..10: note = Synthetic Construct
GSSVRFLSMA

SEQ ID NO: 799 - protein, 10 aa, synthetic construct
  REGION 1..10: note = Synthetic Construct
GSSVSFLSMA

SEQ ID NO: 800 - protein, 10 aa, synthetic construct
  REGION 1..10: note = Synthetic Construct
GSRVSFLSMA

SEQ ID NO: 801 - protein, 10 aa, synthetic construct
  REGION 1..10: note = Synthetic Construct
GSSVKFLSMA

SEQ ID NO: 802 - protein, 10 aa, synthetic construct
  REGION 1..10: note = Synthetic Construct
GSSVSRLSMA

SEQ ID NO: 803 - protein, 10 aa, synthetic construct
  REGION 1..10: note = Synthetic Construct
GRSVSFLSMA

SEQ ID NO: 804 - protein, 10 aa, synthetic construct
  REGION 1..10: note = Synthetic Construct
GRSVSFLSMA

SEQ ID NO: 805 - protein, 10 aa, synthetic construct
  REGION 1..10: note = Synthetic Construct
GSSVKFLSMA

SEQ ID NO: 806 - protein, 10 aa, synthetic construct
  REGION 1..10: note = Synthetic Construct
GSSVSKLSMA

SEQ ID NO: 807 - protein, 10 aa, synthetic construct
  REGION 1..10: note = Synthetic Construct
GSSVSRLSMA

SEQ ID NO: 808 - protein, 10 aa, synthetic construct
  REGION 1..10: note = Synthetic Construct
GSSVKFLSLA

SEQ ID NO: 809 - protein, 10 aa, synthetic construct
  REGION 1..10: note = Synthetic Construct
GSSVSRLSLA

SEQ ID NO: 810 - protein, 10 aa, synthetic construct
  REGION 1..10: note = Synthetic Construct
GTSSSINAMG

SEQ ID NO: 811 - protein, 10 aa, synthetic construct
  REGION 1..10: note = Synthetic Construct
GTTSSINAIG

SEQ ID NO: 812 - protein, 10 aa, synthetic construct
  REGION 1..10: note = Synthetic Construct
GSTSSINAMA

SEQ ID NO: 813 - protein, 10 aa, synthetic construct
  REGION 1..10: note = Synthetic Construct
GQTYRVNAFG

SEQ ID NO: 814 - protein, 10 aa, synthetic construct
  REGION 1..10: note = Synthetic Construct
GSTSSINAMA

SEQ ID NO: 815 - protein, 10 aa, synthetic construct
  REGION 1..10: note = Synthetic Construct
GSASLTNATG

SEQ ID NO: 816 - protein, 10 aa, synthetic construct
  REGION 1..10: note = Synthetic Construct
GYPSLNNAMG

SEQ ID NO: 817 - protein, 10 aa, synthetic construct
  REGION 1..10: note = Synthetic Construct
GSSSTINAIG

SEQ ID NO: 818 - protein, 10 aa, synthetic construct
  REGION 1..10: note = Synthetic Construct
GSTSYINAMG

SEQ ID NO: 819 - protein, 10 aa, synthetic construct
  REGION 1..10: note = Synthetic Construct
GSTSSVNALG

SEQ ID NO: 820 - protein, 10 aa, synthetic construct
  REGION 1..10: note = Synthetic Construct
GSTSLSNAVG

SEQ ID NO: 821 - protein, 10 aa, synthetic construct
  REGION 1..10: note = Synthetic Construct
GSTSSTNAIG

SEQ ID NO: 822 - protein, 10 aa, synthetic construct
  REGION 1..10: note = Synthetic Construct
GLTSTINAMG

SEQ ID NO: 823 - protein, 10 aa, synthetic construct
  REGION 1..10: note = Synthetic Construct
GVSPSKNAIG

SEQ ID NO: 824 - protein, 10 aa, synthetic construct
  REGION 1..10: note = Synthetic Construct
GSTSSINAVG

SEQ ID NO: 825 - protein, 10 aa, synthetic construct
  REGION 1..10: note = Synthetic Construct
GSTTMNNAMA

SEQ ID NO: 826 - protein, 10 aa, synthetic construct
  REGION 1..10: note = Synthetic Construct
GSTSKINAIG

SEQ ID NO: 827 - protein, 10 aa, synthetic construct
  REGION 1..10: note = Synthetic Construct
GQTTALNAMG

SEQ ID NO: 828 - protein, 10 aa, synthetic construct
  REGION 1..10: note = Synthetic Construct
GATSSINAIG

SEQ ID NO: 829 - protein, 10 aa, synthetic construct
  REGION 1..10: note = Synthetic Construct
GSTSTINAMG

SEQ ID NO: 830 - protein, 10 aa, synthetic construct
  REGION 1..10: note = Synthetic Construct
GSTSSINAMG

SEQ ID NO: 831 - protein, 10 aa, synthetic construct
  REGION 1..10: note = Synthetic Construct
GSTSLVNAMG

SEQ ID NO: 832 - protein, 10 aa, synthetic construct
  REGION 1..10: note = Synthetic Construct
GSTSLNNAIG

SEQ ID NO: 833 - protein, 10 aa, synthetic construct
  REGION 1..10: note = Synthetic Construct
GSTSPVNAMA

SEQ ID NO: 834 - protein, 10 aa, synthetic construct
  REGION 1..10: note = Synthetic Construct
GTTSSMNAIG

SEQ ID NO: 835 - protein, 10 aa, synthetic construct
  REGION 1..10: note = Synthetic Construct
GETSSINAMA

SEQ ID NO: 836 - protein, 10 aa, synthetic construct
  REGION 1..10: note = Synthetic Construct
GSTSTINAIG

SEQ ID NO: 837 - protein, 10 aa, synthetic construct
  REGION 1..10: note = Synthetic Construct
GSTYSMNAMG

SEQ ID NO: 838 - protein, 10 aa, synthetic construct
  REGION 1..10: note = Synthetic Construct
GSPSSINAYG

SEQ ID NO: 839 - protein, 10 aa, synthetic construct
  REGION 1..10: note = Synthetic Construct
GSTSTINAIG

SEQ ID NO: 840 - protein, 10 aa, synthetic construct
  REGION 1..10: note = Synthetic Construct
GSTSSINAIG

SEQ ID NO: 841 - protein, 10 aa, synthetic construct
  REGION 1..10: note = Synthetic Construct
GSISSINAMG

SEQ ID NO: 842 - protein, 10 aa, synthetic construct
  REGION 1..10: note = Synthetic Construct
GSTQVNNAMA

SEQ ID NO: 843 - protein, 10 aa, synthetic construct
  REGION 1..10: note = Synthetic Construct
GSTASFNAMA

SEQ ID NO: 844 - protein, 10 aa, synthetic construct
  REGION 1..10: note = Synthetic Construct
GSPLSINAIG

SEQ ID NO: 845 - protein, 10 aa, synthetic construct
  REGION 1..10: note = Synthetic Construct
GSTTFINAIG

SEQ ID NO: 846 - protein, 10 aa, synthetic construct
  REGION 1..10: note = Synthetic Construct
GSTSSINAIG

SEQ ID NO: 847 - protein, 10 aa, synthetic construct
  REGION 1..10: note = Synthetic Construct
GETDTINAVG

SEQ ID NO: 848 - protein, 10 aa, synthetic construct
  REGION 1..10: note = Synthetic Construct
GSTSPINAIG

SEQ ID NO: 849 - protein, 10 aa, synthetic construct
  REGION 1..10: note = Synthetic Construct
GSITSSNAMG

SEQ ID NO: 850 - protein, 10 aa, synthetic construct
  REGION 1..10: note = Synthetic Construct
RYSVSNLSMA

SEQ ID NO: 851 - protein, 10 aa, synthetic construct
  REGION 1..10: note = Synthetic Construct
MSTVSVLSMA

SEQ ID NO: 852 - protein, 10 aa, synthetic construct
  REGION 1..10: note = Synthetic Construct
DSYVSLLSMA

SEQ ID NO: 853 - protein, 10 aa, synthetic construct
  REGION 1..10: note = Synthetic Construct
DSAVSVLSIA

SEQ ID NO: 854 - protein, 10 aa, synthetic construct
  REGION 1..10: note = Synthetic Construct
HSSVTSLSLA

SEQ ID NO: 855 - protein, 10 aa, synthetic construct
  REGION 1..10: note = Synthetic Construct
DSVVKFLSMA

SEQ ID NO: 856 - protein, 10 aa, synthetic construct
  REGION 1..10: note = Synthetic Construct
DPSVWNLSMA

SEQ ID NO: 857 - protein, 10 aa, synthetic construct
  REGION 1..10: note = Synthetic Construct
GTSVMLLSLA

SEQ ID NO: 858 - protein, 10 aa, synthetic construct
  REGION 1..10: note = Synthetic Construct
SSPVSNLSLA

SEQ ID NO: 859 - protein, 10 aa, synthetic construct
  REGION 1..10: note = Synthetic Construct
WRSVLLLSVA

SEQ ID NO: 860 - protein, 10 aa, synthetic construct
  REGION 1..10: note = Synthetic Construct
SSSVQYLSMA

SEQ ID NO: 861 - protein, 10 aa, synthetic construct
  REGION 1..10: note = Synthetic Construct
GTSVSLLSLA

SEQ ID NO: 862 - protein, 10 aa, synthetic construct
  REGION 1..10: note = Synthetic Construct
LSSVSNLSIA

SEQ ID NO: 863 - protein, 10 aa, synthetic construct
  REGION 1..10: note = Synthetic Construct
MYSVSFLSMA

SEQ ID NO: 864 - protein, 10 aa, synthetic construct
  REGION 1..10: note = Synthetic Construct
KSSVSHLSLA

SEQ ID NO: 865 - protein, 10 aa, synthetic construct
  REGION 1..10: note = Synthetic Construct
YTSVLDLSIA

SEQ ID NO: 866 - protein, 10 aa, synthetic construct
  REGION 1..10: note = Synthetic Construct
MSDVSFLSMA

SEQ ID NO: 867 - protein, 10 aa, synthetic construct
  REGION 1..10: note = Synthetic Construct
ESSVSFLSSA

SEQ ID NO: 868 - protein, 10 aa, synthetic construct
  REGION 1..10: note = Synthetic Construct
GDSVSLLSMA

SEQ ID NO: 869 - protein, 10 aa, synthetic construct
  REGION 1..10: note = Synthetic Construct
GSDVWYLSLA

SEQ ID NO: 870 - protein, 10 aa, synthetic construct
  REGION 1..10: note = Synthetic Construct
KSAVAFLSIA

SEQ ID NO: 871 - protein, 10 aa, synthetic construct
  REGION 1..10: note = Synthetic Construct
FSAVAYLSMA

SEQ ID NO: 872 - protein, 10 aa, synthetic construct
  REGION 1..10: note = Synthetic Construct
VYSVYDLSTA

SEQ ID NO: 873 - protein, 10 aa, synthetic construct
  REGION 1..10: note = Synthetic Construct
GDSVSFLSMA

SEQ ID NO: 874 - protein, 10 aa, synthetic construct
  REGION 1..10: note = Synthetic Construct
SSSVSLLSLA

SEQ ID NO: 875 - protein, 10 aa, synthetic construct
  REGION 1..10: note = Synthetic Construct
ADSVSFLSIA

SEQ ID NO: 876 - protein, 10 aa, synthetic construct
  REGION 1..10: note = Synthetic Construct
ASSVTLLSIA

SEQ ID NO: 877 - protein, 10 aa, synthetic construct
  REGION 1..10: note = Synthetic Construct
ADSVSFLSIA

SEQ ID NO: 878 - protein, 10 aa, synthetic construct
  REGION 1..10: note = Synthetic Construct
GTSVWLLSMA

SEQ ID NO: 879 - protein, 10 aa, synthetic construct
  REGION 1..10: note = Synthetic Construct
GSSVSILSIA

SEQ ID NO: 880 - protein, 10 aa, synthetic construct
  REGION 1..10: note = Synthetic Construct
GTAVSNLSIA

SEQ ID NO: 881 - protein, 10 aa, synthetic construct
  REGION 1..10: note = Synthetic Construct
GSAVSMLSLA

SEQ ID NO: 882 - protein, 10 aa, synthetic construct
  REGION 1..10: note = Synthetic Construct
GMTVFFLSMA

SEQ ID NO: 883 - protein, 10 aa, synthetic construct
  REGION 1..10: note = Synthetic Construct
QYSVTFLSVA

SEQ ID NO: 884 - protein, 10 aa, synthetic construct
  REGION 1..10: note = Synthetic Construct
GETVSFLSLA

SEQ ID NO: 885 - protein, 16 aa, synthetic construct
  REGION 1..16: note = Synthetic Construct
VITSFSSTNYADSVKG

SEQ ID NO: 886 - protein, 16 aa, synthetic construct
  REGION 1..16: note = Synthetic Construct
VITSFSSTNYADSVKG

SEQ ID NO: 887 - protein, 16 aa, synthetic construct
  REGION 1..16: note = Synthetic Construct
AITSFSSTNYADSVKG

SEQ ID NO: 888 - protein, 16 aa, synthetic construct
  REGION 1..16: note = Synthetic Construct
RITSGGSTNYADSVKG

SEQ ID NO: 889 - protein, 16 aa, synthetic construct
  REGION 1..16: note = Synthetic Construct
AITSFGSTNYADSVKD

SEQ ID NO: 890 - protein, 16 aa, synthetic construct
  REGION 1..16: note = Synthetic Construct
AITTFDYTNYADSVKG

SEQ ID NO: 891 - protein, 16 aa, synthetic construct
  REGION 1..16: note = Synthetic Construct
AITSFGSTNYADSVKG

SEQ ID NO: 892 - protein, 16 aa, synthetic construct
  REGION 1..16: note = Synthetic Construct
TLTSGGNTNYADSVKG

SEQ ID NO: 893 - protein, 16 aa, synthetic construct
  REGION 1..16: note = Synthetic Construct
TLTSGGNTNYADSVKG

SEQ ID NO: 894 - protein, 16 aa, synthetic construct
  REGION 1..16: note = Synthetic Construct
TLTSGGNTNYADSVKG

SEQ ID NO: 895 - protein, 16 aa, synthetic construct
  REGION 1..16: note = Synthetic Construct
TLTSGGNTNYADSVKG

SEQ ID NO: 896 - protein, 16 aa, synthetic construct
  REGION 1..16: note = Synthetic Construct
SLTSEGLTNYRDSVKG

SEQ ID NO: 897 - protein, 16 aa, synthetic construct
  REGION 1..16: note = Synthetic Construct
AITTWGSTNYADSVKG

SEQ ID NO: 898 - protein, 16 aa, synthetic construct
  REGION 1..16: note = Synthetic Construct
AITSYGSTNYADSVKG

SEQ ID NO: 899 - protein, 16 aa, synthetic construct
  REGION 1..16: note = Synthetic Construct
AITTYGSTNYIDSVKG

SEQ ID NO: 900 - protein, 16 aa, synthetic construct
  REGION 1..16: note = Synthetic Construct
RITTFGTTNYADSVKG

SEQ ID NO: 901 - protein, 17 aa, synthetic construct
  REGION 1..17: note = Synthetic Construct
RITSSGFSTNYADSVKG

SEQ ID NO: 902 - protein, 17 aa, synthetic construct
  REGION 1..17: note = Synthetic Construct
RITSSGFSTNYADSVKG

SEQ ID NO: 903 - protein, 16 aa, synthetic construct
  REGION 1..16: note = Synthetic Construct
NMHSGGSTNYADSVKG

SEQ ID NO: 904 - protein, 16 aa, synthetic construct
  REGION 1..16: note = Synthetic Construct
GISVDGSTNYADSVKG

SEQ ID NO: 905 - protein, 16 aa, synthetic construct
  REGION 1..16: note = Synthetic Construct
GISVDGSTNYADSVKG

SEQ ID NO: 906 - protein, 16 aa, synthetic construct
  REGION 1..16: note = Synthetic Construct
GISVDGSTNYADSVKG

SEQ ID NO: 907 - protein, 16 aa, synthetic construct
  REGION 1..16: note = Synthetic Construct
GISVDGSTNYADSVKG

SEQ ID NO: 908 - protein, 16 aa, synthetic construct
  REGION 1..16: note = Synthetic Construct
GISVDGSTNYADSVKG

SEQ ID NO: 909 - protein, 16 aa, synthetic construct
  REGION 1..16: note = Synthetic Construct
GISTDGSTNYVDSVKG

SEQ ID NO: 910 - protein, 16 aa, synthetic construct
  REGION 1..16: note = Synthetic Construct
GISTDGTTNYVDSVKD

SEQ ID NO: 911 - protein, 16 aa, synthetic construct
  REGION 1..16: note = Synthetic Construct
GISTDGTTNYVDSVKD

SEQ ID NO: 912 - protein, 16 aa, synthetic construct
  REGION 1..16: note = Synthetic Construct
GISTDGTTNYVDSVKD

SEQ ID NO: 913 - protein, 16 aa, synthetic construct
  REGION 1..16: note = Synthetic Construct
GISTDGSTNYADSVKG

SEQ ID NO: 914 - protein, 16 aa, synthetic construct
  REGION 1..16: note = Synthetic Construct
GISTDGSTNYADSVKG

SEQ ID NO: 915 - protein, 16 aa, synthetic construct
  REGION 1..16: note = Synthetic Construct
GISTDGSTNYADSVKG

SEQ ID NO: 916 - protein, 16 aa, synthetic construct
  REGION 1..16: note = Synthetic Construct
GISSDGSTNYVDSVKG

SEQ ID NO: 917 - protein, 16 aa, synthetic construct
  REGION 1..16: note = Synthetic Construct
GISADGSTDYIDSVKG

SEQ ID NO: 918 - protein, 16 aa, synthetic construct
  REGION 1..16: note = Synthetic Construct
GISSDGSTHYVDSVKG

SEQ ID NO: 919 - protein, 16 aa, synthetic construct
  REGION 1..16: note = Synthetic Construct
GISSDGSKNYADSVKG

SEQ ID NO: 920 - protein, 16 aa, synthetic construct
  REGION 1..16: note = Synthetic Construct
GISSDGSKVYADSVKG

SEQ ID NO: 921 - protein, 16 aa, synthetic construct
  REGION 1..16: note = Synthetic Construct
GSSSDGSTHYVDSVRG

SEQ ID NO: 922 - protein, 16 aa, synthetic construct
  REGION 1..16: note = Synthetic Construct
IIRSGGSSNYADTVKG

SEQ ID NO: 923 - protein, 16 aa, synthetic construct
  REGION 1..16: note = Synthetic Construct
LITSGGSSNYADTVKG

SEQ ID NO: 924 - protein, 16 aa, synthetic construct
  REGION 1..16: note = Synthetic Construct
IITSGGSSNYADTVKG

SEQ ID NO: 925 - protein, 16 aa, synthetic construct
  REGION 1..16: note = Synthetic Construct
TIFDGSYTNYADSVKG

SEQ ID NO: 926 - protein, 16 aa, synthetic construct
  REGION 1..16: note = Synthetic Construct
SITTFGSTNYADPVKG

SEQ ID NO: 927 - protein, 16 aa, synthetic construct
  REGION 1..16: note = Synthetic Construct
TITRDGTRNYADSLKG

SEQ ID NO: 928 - protein, 16 aa, synthetic construct
  REGION 1..16: note = Synthetic Construct
TISRGGTRTYADSVKG

SEQ ID NO: 929 - protein, 16 aa, synthetic construct
  REGION 1..16: note = Synthetic Construct
LIGSAGSTKYADSVKG

SEQ ID NO: 930 - protein, 16 aa, synthetic construct
  REGION 1..16: note = Synthetic Construct
RITSGGITKYADSVKG

SEQ ID NO: 931 - protein, 16 aa, synthetic construct
  REGION 1..16: note = Synthetic Construct
RITSGGITKYADSVKG

SEQ ID NO: 932 - protein, 16 aa, synthetic construct
  REGION 1..16: note = Synthetic Construct
RITSGGITKYADSVKG

SEQ ID NO: 933 - protein, 16 aa, synthetic construct
  REGION 1..16: note = Synthetic Construct
RITSGGITKYADSVKG

SEQ ID NO: 934 - protein, 16 aa, synthetic construct
  REGION 1..16: note = Synthetic Construct
AITTSGNTSYADSVKG

SEQ ID NO: 935 - protein, 16 aa, synthetic construct
  REGION 1..16: note = Synthetic Construct
VITRGGATNYADSVKG

SEQ ID NO: 936 - protein, 16 aa, synthetic construct
  REGION 1..16: note = Synthetic Construct
SIAGDGRTNYAESTEG

SEQ ID NO: 937 - protein, 16 aa, synthetic construct
  REGION 1..16: note = Synthetic Construct
VITSFSSTNYADSVKG

SEQ ID NO: 938 - protein, 16 aa, synthetic construct
  REGION 1..16: note = Synthetic Construct
IIRSGGSSNYADTVKG

SEQ ID NO: 939 - protein, 16 aa, synthetic construct
  REGION 1..16: note = Synthetic Construct
GISVDGSTNYADSVKG

SEQ ID NO: 940 - protein, 16 aa, synthetic construct
  REGION 1..16: note = Synthetic Construct
AITTSGNTSYADSVKG

SEQ ID NO: 941 - protein, 16 aa, synthetic construct
  REGION 1..16: note = Synthetic Construct
TLTSGGNTNYADSVKG

SEQ ID NO: 942 - protein, 16 aa, synthetic construct
  REGION 1..16: note = Synthetic Construct
TLTSGGNTNYADSVKG

SEQ ID NO: 943 - protein, 16 aa, synthetic construct
  REGION 1..16: note = Synthetic Construct
AITTFDYTNYADSVKG

SEQ ID NO: 944 - protein, 16 aa, synthetic construct
  REGION 1..16: note = Synthetic Construct
GISSDGSKNYADSVKG

SEQ ID NO: 945 - protein, 16 aa, synthetic construct
  REGION 1..16: note = Synthetic Construct
AITSYGSTNYADSVKG

SEQ ID NO: 946 - protein, 16 aa, synthetic construct
  REGION 1..16: note = Synthetic Construct
IITSGGSSNYADTVKG

SEQ ID NO: 947 - protein, 17 aa, synthetic construct
  REGION 1..17: note = Synthetic Construct
RITSSGFSTNYADSVKG

SEQ ID NO: 948 - protein, 16 aa, synthetic construct
  REGION 1..16: note = Synthetic Construct
VITRGGATNYADSVKG

SEQ ID NO: 949 - protein, 16 aa, synthetic construct
  REGION 1..16: note = Synthetic Construct
RITSGGSTNYADSVKG

SEQ ID NO: 950 - protein, 16 aa, synthetic construct
  REGION 1..16: note = Synthetic Construct
RITSGGITKYADSVKG

SEQ ID NO: 951 - protein, 16 aa, synthetic construct
  REGION 1..16: note = Synthetic Construct
TIFDGSYTNYADSVKG

SEQ ID NO: 952 - protein, 16 aa, synthetic construct
  REGION 1..16: note = Synthetic Construct
GISSDGSKVYADSVKG

SEQ ID NO: 953 - protein, 16 aa, synthetic construct
  REGION 1..16: note = Synthetic Construct
SITTFGSTNYADPVKG

SEQ ID NO: 954 - protein, 16 aa, synthetic construct
  REGION 1..16: note = Synthetic Construct
AITTWGSTNYADSVKG

SEQ ID NO: 955 - protein, 17 aa, synthetic construct
  REGION 1..17: note = Synthetic Construct
RITSSGFSTNYADSVKG

SEQ ID NO: 956 - protein, 16 aa, synthetic construct
  REGION 1..16: note = Synthetic Construct
NMHSGGSTNYADSVKG

SEQ ID NO: 957 - protein, 16 aa, synthetic construct
  REGION 1..16: note = Synthetic Construct
GISTDGSTNYVDSVKG

SEQ ID NO: 958 - protein, 16 aa, synthetic construct
  REGION 1..16: note = Synthetic Construct
TITRDGTRNYADSLKG

SEQ ID NO: 959 - protein, 16 aa, synthetic construct
  REGION 1..16: note = Synthetic Construct
GISADGSTDYIDSVKG

SEQ ID NO: 960 - protein, 16 aa, synthetic construct
  REGION 1..16: note = Synthetic Construct
SIAGDGRTNYAESTEG

SEQ ID NO: 961 - protein, 16 aa, synthetic construct
  REGION 1..16: note = Synthetic Construct
GISVDGSTNYADSVKG

SEQ ID NO: 962 - protein, 16 aa, synthetic construct
  REGION 1..16: note = Synthetic Construct
RITTFGTTNYADSVKG

SEQ ID NO: 963 - protein, 16 aa, synthetic construct
  REGION 1..16: note = Synthetic Construct
TISRGGTRTYADSVKG

SEQ ID NO: 964 - protein, 16 aa, synthetic construct
  REGION 1..16: note = Synthetic Construct
AITSFGSTNYADSVKD

SEQ ID NO: 965 - protein, 16 aa, synthetic construct
  REGION 1..16: note = Synthetic Construct
LITSGGSSNYADTVKG

SEQ ID NO: 966 - protein, 16 aa, synthetic construct
  REGION 1..16: note = Synthetic Construct
SLTSEGLTNYRDSVKG

SEQ ID NO: 967 - protein, 16 aa, synthetic construct
  REGION 1..16: note = Synthetic Construct
GISSDGSTHYVDSVKG

SEQ ID NO: 968 - protein, 16 aa, synthetic construct
  REGION 1..16: note = Synthetic Construct
LIGSAGSTKYADSVKG

SEQ ID NO: 969 - protein, 16 aa, synthetic construct
  REGION 1..16: note = Synthetic Construct
GSSSDGSTHYVDSVRG

SEQ ID NO: 970 - protein, 16 aa, synthetic construct
  REGION 1..16: note = Synthetic Construct
AITSFGSTNYADSVKG

SEQ ID NO: 971 - protein, 16 aa, synthetic construct
  REGION 1..16: note = Synthetic Construct
GISSDGSFVYADSVKG

SEQ ID NO: 972 - protein, 16 aa, synthetic construct
  REGION 1..16: note = Synthetic Construct
GISSDGSKVYADSVKG

SEQ ID NO: 973 - protein, 16 aa, synthetic construct
  REGION 1..16: note = Synthetic Construct
GISSDGSKVYEDSVKG

SEQ ID NO: 974 - protein, 16 aa, synthetic construct
  REGION 1..16: note = Synthetic Construct
GISSDGSKVYADSVKG

SEQ ID NO: 975 - protein, 16 aa, synthetic construct
  REGION 1..16: note = Synthetic Construct
GISSDGSSVYADSVKG

SEQ ID NO: 976 - protein, 16 aa, synthetic construct
  REGION 1..16: note = Synthetic Construct
GISSDGSKVYADSVKG

SEQ ID NO: 977 - protein, 16 aa, synthetic construct
  REGION 1..16: note = Synthetic Construct
GISSDGSKLYADSVKG

SEQ ID NO: 978 - protein, 16 aa, synthetic construct
  REGION 1..16: note = Synthetic Construct
GISSDGSKVYADSVKG

SEQ ID NO: 979 - protein, 16 aa, synthetic construct
  REGION 1..16: note = Synthetic Construct
GISSDGSKVYIDSVKG

SEQ ID NO: 980 - protein, 16 aa, synthetic construct
  REGION 1..16: note = Synthetic Construct
GISSDGSKVYSDSVKG

SEQ ID NO: 981 - protein, 16 aa, synthetic construct
  REGION 1..16: note = Synthetic Construct
GISSDGSKVIADSVKG

SEQ ID NO: 982 - protein, 16 aa, synthetic construct
  REGION 1..16: note = Synthetic Construct
GISSDGSKIYADSVKG

SEQ ID NO: 983 - protein, 16 aa, synthetic construct
  REGION 1..16: note = Synthetic Construct
GISSDGSKVYTDSVKG

SEQ ID NO: 984 - protein, 16 aa, synthetic construct
  REGION 1..16: note = Synthetic Construct
GISSDGSLVYADSVKG

SEQ ID NO: 985 - protein, 16 aa, synthetic construct
  REGION 1..16: note = Synthetic Construct
GISSDGSKVYADSVKG

SEQ ID NO: 986 - protein, 16 aa, synthetic construct
  REGION 1..16: note = Synthetic Construct
GISSDGSKVYSDSVKG

SEQ ID NO: 987 - protein, 16 aa, synthetic construct
  REGION 1..16: note = Synthetic Construct
GISSDGSKVYVDSVKG

SEQ ID NO: 988 - protein, 16 aa, synthetic construct
  REGION 1..16: note = Synthetic Construct
GISSDGSKVYVDSVKG

SEQ ID NO: 989 - protein, 16 aa, synthetic construct
  REGION 1..16: note = Synthetic Construct
GISSDGSKVYADSVKG

SEQ ID NO: 990 - protein, 16 aa, synthetic construct
  REGION 1..16: note = Synthetic Construct
GISSDGSKVYADSVKG

SEQ ID NO: 991 - protein, 16 aa, synthetic construct
  REGION 1..16: note = Synthetic Construct
GISSDGSKVYRDSVKG

SEQ ID NO: 992 - protein, 16 aa, synthetic construct
  REGION 1..16: note = Synthetic Construct
GISSDGSKVYSDSVKG

SEQ ID NO: 993 - protein, 16 aa, synthetic construct
  REGION 1..16: note = Synthetic Construct
GISSDNSKVYADSVKG

SEQ ID NO: 994 - protein, 16 aa, synthetic construct
  REGION 1..16: note = Synthetic Construct
GISSDGSKVYADSVKG

SEQ ID NO: 995 - protein, 16 aa, synthetic construct
  REGION 1..16: note = Synthetic Construct
GISSDGSKVYADSVKG

SEQ ID NO: 996 - protein, 16 aa, synthetic construct
  REGION 1..16: note = Synthetic Construct
GISSDGSKVYEDSVKG

SEQ ID NO: 997 - protein, 16 aa, synthetic construct
  REGION 1..16: note = Synthetic Construct
GISSDGSKVYADSVKG

SEQ ID NO: 998 - protein, 16 aa, synthetic construct
  REGION 1..16: note = Synthetic Construct
GISSDGSKVYAVSVKG

SEQ ID NO: 999 - protein, 16 aa, synthetic construct
  REGION 1..16: note = Synthetic Construct
GVSSDGSKVYADSVKG

SEQ ID NO: 1000 - protein, 16 aa, synthetic construct
  REGION 1..16: note = Synthetic Construct
GISSDGSKVYEDSVKG

SEQ ID NO: 1001 - protein, 16 aa, synthetic construct
  REGION 1..16: note = Synthetic Construct
GISSDGSKVYAGSVKG

SEQ ID NO: 1002 - protein, 16 aa, synthetic construct
  REGION 1..16: note = Synthetic Construct
GISSDKSKVYADSVKG

SEQ ID NO: 1003 - protein, 16 aa, synthetic construct
  REGION 1..16: note = Synthetic Construct
GISSNGSKVYADSVKG

SEQ ID NO: 1004 - protein, 16 aa, synthetic construct
  REGION 1..16: note = Synthetic Construct
GISSDGSKVLADSVKG

SEQ ID NO: 1005 - protein, 16 aa, synthetic construct
  REGION 1..16: note = Synthetic Construct
GISSDGSKVYADSVKG

SEQ ID NO: 1006 - protein, 16 aa, synthetic construct
  REGION 1..16: note = Synthetic Construct
GISSDNSKVYADSVKG

SEQ ID NO: 1007 - protein, 16 aa, synthetic construct
  REGION 1..16: note = Synthetic Construct
GISSDGSKVYADSVKG

SEQ ID NO: 1008 - protein, 16 aa, synthetic construct
  REGION 1..16: note = Synthetic Construct
GISSDGSKVYTDSVKG

SEQ ID NO: 1009 - protein, 16 aa, synthetic construct
  REGION 1..16: note = Synthetic Construct
GISSDGSKVYTDSVKG

SEQ ID NO: 1010 - protein, 16 aa, synthetic construct
  REGION 1..16: note = Synthetic Construct
GISSDNSKVYADSVKG

SEQ ID NO: 1011 - protein, 16 aa, synthetic construct
  REGION 1..16: note = Synthetic Construct
GISSDGSRVYADSVKG

SEQ ID NO: 1012 - protein, 16 aa, synthetic construct
  REGION 1..16: note = Synthetic Construct
GISSDGSQVYADSVKG

SEQ ID NO: 1013 - protein, 16 aa, synthetic construct
  REGION 1..16: note = Synthetic Construct
GISSDGSKAYADSVKG

SEQ ID NO: 1014 - protein, 16 aa, synthetic construct
  REGION 1..16: note = Synthetic Construct
GISSDGSKVYAKSAKG

SEQ ID NO: 1015 - protein, 16 aa, synthetic construct
  REGION 1..16: note = Synthetic Construct
GISSDGSKVYNDSVKG

SEQ ID NO: 1016 - protein, 16 aa, synthetic construct
  REGION 1..16: note = Synthetic Construct
GISSDGSKVIADSVKG

SEQ ID NO: 1017 - protein, 16 aa, synthetic construct
  REGION 1..16: note = Synthetic Construct
GISSDGSKVYTDSVKG

SEQ ID NO: 1018 - protein, 16 aa, synthetic construct
  REGION 1..16: note = Synthetic Construct
GISSDGSKVYIDSVKG

SEQ ID NO: 1019 - protein, 16 aa, synthetic construct
  REGION 1..16: note = Synthetic Construct
GISSDGSKVYYDSVKG

SEQ ID NO: 1020 - protein, 16 aa, synthetic construct
  REGION 1..16: note = Synthetic Construct
GISSDGSKVYVDSVKG

SEQ ID NO: 1021 - protein, 16 aa, synthetic construct
  REGION 1..16: note = Synthetic Construct
GISSDGSKVYGDSVKG

SEQ ID NO: 1022 - protein, 16 aa, synthetic construct
  REGION 1..16: note = Synthetic Construct
GISSDQSKVYADSAKG

SEQ ID NO: 1023 - protein, 16 aa, synthetic construct
  REGION 1..16: note = Synthetic Construct
GISSDGSKVYSDSVKG

SEQ ID NO: 1024 - protein, 16 aa, synthetic construct
  REGION 1..16: note = Synthetic Construct
GISSDGSKVYADSVKG

SEQ ID NO: 1025 - protein, 16 aa, synthetic construct
  REGION 1..16: note = Synthetic Construct
GISSDGSKVIADSVKG

SEQ ID NO: 1026 - protein, 16 aa, synthetic construct
  REGION 1..16: note = Synthetic Construct
GISSDGSKVDADSVKG

SEQ ID NO: 1027 - protein, 16 aa, synthetic construct
  REGION 1..16: note = Synthetic Construct
GISSDGSKVYKDSVKG

SEQ ID NO: 1028 - protein, 16 aa, synthetic construct
  REGION 1..16: note = Synthetic Construct
GISSNGSKVYADSVKG

SEQ ID NO: 1029 - protein, 16 aa, synthetic construct
  REGION 1..16: note = Synthetic Construct
GISSDGSKVYKDSVKG

SEQ ID NO: 1030 - protein, 16 aa, synthetic construct
  REGION 1..16: note = Synthetic Construct
GISSDGSKVYADSVKG

SEQ ID NO: 1031 - protein, 16 aa, synthetic construct
  REGION 1..16: note = Synthetic Construct
GISSDGSKVYQDSVKG

SEQ ID NO: 1032 - protein, 16 aa, synthetic construct
  REGION 1..16: note = Synthetic Construct
GISSDGSKVYAESVKG

SEQ ID NO: 1033 - protein, 16 aa, synthetic construct
  REGION 1..16: note = Synthetic Construct
GISSDGSKVLADSVKG

SEQ ID NO: 1034 - protein, 16 aa, synthetic construct
  REGION 1..16: note = Synthetic Construct
GISSDGSKYYADSVKG

SEQ ID NO: 1035 - protein, 16 aa, synthetic construct
  REGION 1..16: note = Synthetic Construct
GISSDGSKVYAVSVKG

SEQ ID NO: 1036 - protein, 16 aa, synthetic construct
  REGION 1..16: note = Synthetic Construct
GISSDGSKVVADSVKG

SEQ ID NO: 1037 - protein, 16 aa, synthetic construct
  REGION 1..16: note = Synthetic Construct
GISSDGSKVYADSVKG

SEQ ID NO: 1038 - protein, 16 aa, synthetic construct
  REGION 1..16: note = Synthetic Construct
GISSDGSKVYADSVKG

SEQ ID NO: 1039 - protein, 16 aa, synthetic construct
  REGION 1..16: note = Synthetic Construct
GISSDNSKVYADSVKG

SEQ ID NO: 1040 - protein, 16 aa, synthetic construct
  REGION 1..16: note = Synthetic Construct
GISSDGSKVYAQSVKG

SEQ ID NO: 1041 - protein, 16 aa, synthetic construct
  REGION 1..16: note = Synthetic Construct
GISSDGSKVYVDSVKG

SEQ ID NO: 1042 - protein, 16 aa, synthetic construct
  REGION 1..16: note = Synthetic Construct
GISSDGSKVYSDSVKG

SEQ ID NO: 1043 - protein, 16 aa, synthetic construct
  REGION 1..16: note = Synthetic Construct
GISSDGSKVLADSVKG

SEQ ID NO: 1044 - protein, 16 aa, synthetic construct
  REGION 1..16: note = Synthetic Construct
GISSDGSKVYNDSVKG

SEQ ID NO: 1045 - protein, 16 aa, synthetic construct
  REGION 1..16: note = Synthetic Construct
GISSDGSKVYNDSVKG

SEQ ID NO: 1046 - protein, 16 aa, synthetic construct
  REGION 1..16: note = Synthetic Construct
GISSDGSKVYVDSVKG

SEQ ID NO: 1047 - protein, 16 aa, synthetic construct
  REGION 1..16: note = Synthetic Construct
GISSDGSKVVADSVKG

SEQ ID NO: 1048 - protein, 16 aa, synthetic construct
  REGION 1..16: note = Synthetic Construct
GISSDGSKVYGDSVKG

SEQ ID NO: 1049 - protein, 16 aa, synthetic construct
  REGION 1..16: note = Synthetic Construct
GISSDGSKVYTDSVKG

SEQ ID NO: 1050 - protein, 16 aa, synthetic construct
  REGION 1..16: note = Synthetic Construct
GISSDGSKVYNDSVKG

SEQ ID NO: 1051 - protein, 16 aa, synthetic construct
  REGION 1..16: note = Synthetic Construct
GISSDGSKVTADSVKG

SEQ ID NO: 1052 - protein, 16 aa, synthetic construct
  REGION 1..16: note = Synthetic Construct
GISSDGSKVYRDSVKG

SEQ ID NO: 1053 - protein, 16 aa, synthetic construct
  REGION 1..16: note = Synthetic Construct
GISSNGSKVYSDSVKG

SEQ ID NO: 1054 - protein, 16 aa, synthetic construct
  REGION 1..16: note = Synthetic Construct
GISSDGSKVYSDSVKG

SEQ ID NO: 1055 - protein, 16 aa, synthetic construct
  REGION 1..16: note = Synthetic Construct
GISSDGSKVYADSVKG

SEQ ID NO: 1056 - protein, 16 aa, synthetic construct
  REGION 1..16: note = Synthetic Construct
GISSDGSKVYADSVKG

SEQ ID NO: 1057 - protein, 16 aa, synthetic construct
  REGION 1..16: note = Synthetic Construct
GISSDGSLVYADSVKG

SEQ ID NO: 1058 - protein, 16 aa, synthetic construct
  REGION 1..16: note = Synthetic Construct
GISSDGTKVYADSVKG

SEQ ID NO: 1059 - protein, 16 aa, synthetic construct
  REGION 1..16: note = Synthetic Construct
GISSDGSKVYADSVKG

SEQ ID NO: 1060 - protein, 16 aa, synthetic construct
  REGION 1..16: note = Synthetic Construct
GISSDGSKLYLDSVKG

SEQ ID NO: 1061 - protein, 16 aa, synthetic construct
  REGION 1..16: note = Synthetic Construct
GISSDGSRVYADSVKG

SEQ ID NO: 1062 - protein, 16 aa, synthetic construct
  REGION 1..16: note = Synthetic Construct
GISSDGSKVYNDSVKG

SEQ ID NO: 1063 - protein, 16 aa, synthetic construct
  REGION 1..16: note = Synthetic Construct
GISSDGSKVYADSVKG

SEQ ID NO: 1064 - protein, 16 aa, synthetic construct
  REGION 1..16: note = Synthetic Construct
GISSDGSKVYVDSVKG

SEQ ID NO: 1065 - protein, 16 aa, synthetic construct
  REGION 1..16: note = Synthetic Construct
GISSDGSKLYADSVKG

SEQ ID NO: 1066 - protein, 16 aa, synthetic construct
  REGION 1..16: note = Synthetic Construct
GISSDGSKVYKDSVKG

SEQ ID NO: 1067 - protein, 16 aa, synthetic construct
  REGION 1..16: note = Synthetic Construct
GISSDGSKVYADSVKG

SEQ ID NO: 1068 - protein, 16 aa, synthetic construct
  REGION 1..16: note = Synthetic Construct
GISSDGSKVYQDSVKG

SEQ ID NO: 1069 - protein, 16 aa, synthetic construct
  REGION 1..16: note = Synthetic Construct
GISSDGTKIYADSAKV

SEQ ID NO: 1070 - protein, 16 aa, synthetic construct
  REGION 1..16: note = Synthetic Construct
GISSDRSKVYADSVKG

SEQ ID NO: 1071 - protein, 16 aa, synthetic construct
  REGION 1..16: note = Synthetic Construct
GISSDGSLVYADSVKG

SEQ ID NO: 1072 - protein, 16 aa, synthetic construct
  REGION 1..16: note = Synthetic Construct
GISSDGSKVYADSVKG

SEQ ID NO: 1073 - protein, 16 aa, synthetic construct
  REGION 1..16: note = Synthetic Construct
GISSDGSKVYRDSVKG

SEQ ID NO: 1074 - protein, 16 aa, synthetic construct
  REGION 1..16: note = Synthetic Construct
GISSDGSKVYADSVKG

SEQ ID NO: 1075 - protein, 16 aa, synthetic construct
  REGION 1..16: note = Synthetic Construct
GISSDGSKVYSDSVKG

SEQ ID NO: 1076 - protein, 16 aa, synthetic construct
  REGION 1..16: note = Synthetic Construct
GISSDGTKVYRDSVKG

SEQ ID NO: 1077 - protein, 16 aa, synthetic construct
  REGION 1..16: note = Synthetic Construct
GISSDGSKVYNDSVKG

SEQ ID NO: 1078 - protein, 16 aa, synthetic construct
  REGION 1..16: note = Synthetic Construct
GISSDGSKVYADSVKG

SEQ ID NO: 1079 - protein, 16 aa, synthetic construct
  REGION 1..16: note = Synthetic Construct
GISSDGSKVYADSVKG

SEQ ID NO: 1080 - protein, 16 aa, synthetic construct
  REGION 1..16: note = Synthetic Construct
GISSDGSKVYTDSVKG

SEQ ID NO: 1081 - protein, 16 aa, synthetic construct
  REGION 1..16: note = Synthetic Construct
GISPDGTKAYADSAKV

SEQ ID NO: 1082 - protein, 16 aa, synthetic construct
  REGION 1..16: note = Synthetic Construct
GISSDGSKVYVDSVKG

SEQ ID NO: 1083 - protein, 16 aa, synthetic construct
  REGION 1..16: note = Synthetic Construct
GISSDGSKVYSDSVKG

SEQ ID NO: 1084 - protein, 16 aa, synthetic construct
  REGION 1..16: note = Synthetic Construct
GISSDGSKVYASSVKG

SEQ ID NO: 1085 - protein, 16 aa, synthetic construct
  REGION 1..16: note = Synthetic Construct
GISADGSKVYADSVKG

SEQ ID NO: 1086 - protein, 16 aa, synthetic construct
  REGION 1..16: note = Synthetic Construct
GISSDGSKVYASSAKG

SEQ ID NO: 1087 - protein, 16 aa, synthetic construct
  REGION 1..16: note = Synthetic Construct
GISSDGSKVYADSVKG

SEQ ID NO: 1088 - protein, 16 aa, synthetic construct
  REGION 1..16: note = Synthetic Construct
GISSDGSSVYADSVKG

SEQ ID NO: 1089 - protein, 16 aa, synthetic construct
  REGION 1..16: note = Synthetic Construct
GISSDGSKVYSDSVKG

SEQ ID NO: 1090 - protein, 16 aa, synthetic construct
  REGION 1..16: note = Synthetic Construct
GISSDGSKVYAGSVKG

SEQ ID NO: 1091 - protein, 16 aa, synthetic construct
  REGION 1..16: note = Synthetic Construct
GISSDNSKVYADSVKG

SEQ ID NO: 1092 - protein, 16 aa, synthetic construct
  REGION 1..16: note = Synthetic Construct
GISSDGSAVYADSVKG

SEQ ID NO: 1093 - protein, 16 aa, synthetic construct
  REGION 1..16: note = Synthetic Construct
GISSDGSSVYADSVKG

SEQ ID NO: 1094 - protein, 16 aa, synthetic construct
  REGION 1..16: note = Synthetic Construct
GISSNGTKVYADSAKV

SEQ ID NO: 1095 - protein, 16 aa, synthetic construct
  REGION 1..16: note = Synthetic Construct
GISSDGSKLYADSVKG

SEQ ID NO: 1096 - protein, 16 aa, synthetic construct
  REGION 1..16: note = Synthetic Construct
GISSDGSKVYKDSVKG

SEQ ID NO: 1097 - protein, 16 aa, synthetic construct
  REGION 1..16: note = Synthetic Construct
GISSDGSLVYADSVKG

SEQ ID NO: 1098 - protein, 16 aa, synthetic construct
  REGION 1..16: note = Synthetic Construct
GISSDGSLVYADSVKG

SEQ ID NO: 1099 - protein, 16 aa, synthetic construct
  REGION 1..16: note = Synthetic Construct
GISSDGSKVYADSVKG

SEQ ID NO: 1100 - protein, 16 aa, synthetic construct
  REGION 1..16: note = Synthetic Construct
GISSDGSKVYADSVKG

SEQ ID NO: 1101 - protein, 16 aa, synthetic construct
  REGION 1..16: note = Synthetic Construct
GVSSDGSKVYADSVKG

SEQ ID NO: 1102 - protein, 16 aa, synthetic construct
  REGION 1..16: note = Synthetic Construct
GISRDGSKVYADSVKG

SEQ ID NO: 1103 - protein, 16 aa, synthetic construct
  REGION 1..16: note = Synthetic Construct
GISSDGSKLYADSVKG

SEQ ID NO: 1104 - protein, 16 aa, synthetic construct
  REGION 1..16: note = Synthetic Construct
GISSDGSKVYADSVKG

SEQ ID NO: 1105 - protein, 16 aa, synthetic construct
  REGION 1..16: note = Synthetic Construct
GISSDGSKVYADSVKG

SEQ ID NO: 1106 - protein, 16 aa, synthetic construct
  REGION 1..16: note = Synthetic Construct
GISSDGSKVYADSVKG

SEQ ID NO: 1107 - protein, 16 aa, synthetic construct
  REGION 1..16: note = Synthetic Construct
GISSDTSKVYADSVKG

SEQ ID NO: 1108 - protein, 16 aa, synthetic construct
  REGION 1..16: note = Synthetic Construct
GISSDGSKVYADSVKG

SEQ ID NO: 1109 - protein, 16 aa, synthetic construct
  REGION 1..16: note = Synthetic Construct
GISSDGSTVYADSVKG

SEQ ID NO: 1110 - protein, 16 aa, synthetic construct
  REGION 1..16: note = Synthetic Construct
GISKDGSKVYADSAKG

SEQ ID NO: 1111 - protein, 16 aa, synthetic construct
  REGION 1..16: note = Synthetic Construct
GISSDGSKVYSDSVKG

SEQ ID NO: 1112 - protein, 16 aa, synthetic construct
  REGION 1..16: note = Synthetic Construct
GISSDGSKVYSDSVKG

SEQ ID NO: 1113 - protein, 16 aa, synthetic construct
  REGION 1..16: note = Synthetic Construct
GISADGSTDYIDSVKG

SEQ ID NO: 1114 - protein, 16 aa, synthetic construct
  REGION 1..16: note = Synthetic Construct
GISADGSTAYIDSVKG

SEQ ID NO: 1115 - protein, 16 aa, synthetic construct
  REGION 1..16: note = Synthetic Construct
GISRDGSTDYIDSVKG

SEQ ID NO: 1116 - protein, 16 aa, synthetic construct
  REGION 1..16: note = Synthetic Construct
GISRDGSTDYIDSVKG

SEQ ID NO: 1117 - protein, 16 aa, synthetic construct
  REGION 1..16: note = Synthetic Construct
GISEAGSTDYIDSVKG

SEQ ID NO: 1118 - protein, 16 aa, synthetic construct
  REGION 1..16: note = Synthetic Construct
GISADGSTDYVDSVKG

SEQ ID NO: 1119 - protein, 16 aa, synthetic construct
  REGION 1..16: note = Synthetic Construct
GISADGSTDYIRSVKG

SEQ ID NO: 1120 - protein, 16 aa, synthetic construct
  REGION 1..16: note = Synthetic Construct
GISADGSVDYIDSVKG

SEQ ID NO: 1121 - protein, 16 aa, synthetic construct
  REGION 1..16: note = Synthetic Construct
GISADGSTLYIDSVKG

SEQ ID NO: 1122 - protein, 16 aa, synthetic construct
  REGION 1..16: note = Synthetic Construct
GISTDGSTDYIDSVKG

SEQ ID NO: 1123 - protein, 16 aa, synthetic construct
  REGION 1..16: note = Synthetic Construct
GISGDGSTDYIDSVKG

SEQ ID NO: 1124 - protein, 16 aa, synthetic construct
  REGION 1..16: note = Synthetic Construct
GISADGSTDYINSVKG

SEQ ID NO: 1125 - protein, 16 aa, synthetic construct
  REGION 1..16: note = Synthetic Construct
GISARGSTDYIDSVKG

SEQ ID NO: 1126 - protein, 16 aa, synthetic construct
  REGION 1..16: note = Synthetic Construct
GISADGSTTYIDSVKG

SEQ ID NO: 1127 - protein, 16 aa, synthetic construct
  REGION 1..16: note = Synthetic Construct
GISKDGSTDYIDSVKG

SEQ ID NO: 1128 - protein, 16 aa, synthetic construct
  REGION 1..16: note = Synthetic Construct
GISADGSTTYIDSVKG

SEQ ID NO: 1129 - protein, 16 aa, synthetic construct
  REGION 1..16: note = Synthetic Construct
GISANGSTDYIDSVKG

SEQ ID NO: 1130 - protein, 16 aa, synthetic construct
  REGION 1..16: note = Synthetic Construct
GISRDGSTDYIDSVKG

SEQ ID NO: 1131 - protein, 16 aa, synthetic construct
  REGION 1..16: note = Synthetic Construct
GISADGSADYIDSVKG

SEQ ID NO: 1132 - protein, 16 aa, synthetic construct
  REGION 1..16: note = Synthetic Construct
GISAHGSTDYIDSVKG

SEQ ID NO: 1133 - protein, 16 aa, synthetic construct
  REGION 1..16: note = Synthetic Construct
GISADGSTIYIDSVKG

SEQ ID NO: 1134 - protein, 16 aa, synthetic construct
  REGION 1..16: note = Synthetic Construct
GISRDGSTVYIDSVKG

SEQ ID NO: 1135 - protein, 16 aa, synthetic construct
  REGION 1..16: note = Synthetic Construct
GISADGPTDYIDSVKG

SEQ ID NO: 1136 - protein, 16 aa, synthetic construct
  REGION 1..16: note = Synthetic Construct
GISADGSTTYIDSVKG

SEQ ID NO: 1137 - protein, 16 aa, synthetic construct
  REGION 1..16: note = Synthetic Construct
GISADGSTDYIASVKG

SEQ ID NO: 1138 - protein, 16 aa, synthetic construct
  REGION 1..16: note = Synthetic Construct
GISLDGSTDYIDSVKG

SEQ ID NO: 1139 - protein, 16 aa, synthetic construct
  REGION 1..16: note = Synthetic Construct
GISADGSTIYIDSVKG

SEQ ID NO: 1140 - protein, 16 aa, synthetic construct
  REGION 1..16: note = Synthetic Construct
GISAHGSTDYIDSVKG

SEQ ID NO: 1141 - protein, 16 aa, synthetic construct
  REGION 1..16: note = Synthetic Construct
GISRDGSTDYIDSVKG

SEQ ID NO: 1142 - protein, 16 aa, synthetic construct
  REGION 1..16: note = Synthetic Construct
GISRDGSTDYIDSVKG

SEQ ID NO: 1143 - protein, 16 aa, synthetic construct
  REGION 1..16: note = Synthetic Construct
GISADGSMDYIDSVKG

SEQ ID NO: 1144 - protein, 16 aa, synthetic construct
  REGION 1..16: note = Synthetic Construct
GISADGSTDYIDSVKG

SEQ ID NO: 1145 - protein, 16 aa, synthetic construct
  REGION 1..16: note = Synthetic Construct
GISADGSTDYIDSVKG

SEQ ID NO: 1146 - protein, 16 aa, synthetic construct
  REGION 1..16: note = Synthetic Construct
GISANGSTDYIDSVKG

SEQ ID NO: 1147 - protein, 16 aa, synthetic construct
  REGION 1..16: note = Synthetic Construct
GISANGSTTYIDSVKG

SEQ ID NO: 1148 - protein, 16 aa, synthetic construct
  REGION 1..16: note = Synthetic Construct
GISADGSTSYIDSVKG

SEQ ID NO: 1149 - protein, 16 aa, synthetic construct
  REGION 1..16: note = Synthetic Construct
GISADGSRDYIDSVKG

SEQ ID NO: 1150 - protein, 16 aa, synthetic construct
  REGION 1..16: note = Synthetic Construct
GISADGSTMYIDSVKG

SEQ ID NO: 1151 - protein, 16 aa, synthetic construct
  REGION 1..16: note = Synthetic Construct
GISPDGSTDYIDSVKG

SEQ ID NO: 1152 - protein, 16 aa, synthetic construct
  REGION 1..16: note = Synthetic Construct
GISGDGSTDYIDSVKG

SEQ ID NO: 1153 - protein, 16 aa, synthetic construct
  REGION 1..16: note = Synthetic Construct
GISRDGSTDYIDSVKG

SEQ ID NO: 1154 - protein, 16 aa, synthetic construct
  REGION 1..16: note = Synthetic Construct
GISRDGSTDYIDSVKG

SEQ ID NO: 1155 - protein, 16 aa, synthetic construct
  REGION 1..16: note = Synthetic Construct
GISRDGSTDYIDSVKG

SEQ ID NO: 1156 - protein, 16 aa, synthetic construct
  REGION 1..16: note = Synthetic Construct
GISADGSTDYIDSVKG

SEQ ID NO: 1157 - protein, 16 aa, synthetic construct
  REGION 1..16: note = Synthetic Construct
GISTDGSTDYIDSVKG

SEQ ID NO: 1158 - protein, 16 aa, synthetic construct
  REGION 1..16: note = Synthetic Construct
GISADGSTSYIDSVKG

SEQ ID NO: 1159 - protein, 16 aa, synthetic construct
  REGION 1..16: note = Synthetic Construct
GISADGSTLYIDSVKG

SEQ ID NO: 1160 - protein, 16 aa, synthetic construct
  REGION 1..16: note = Synthetic Construct
GISRDGSTDYIDSVKG

SEQ ID NO: 1161 - protein, 16 aa, synthetic construct
  REGION 1..16: note = Synthetic Construct
GISADGSTVYIDSVKG

SEQ ID NO: 1162 - protein, 16 aa, synthetic construct
  REGION 1..16: note = Synthetic Construct
GISTDGSTDYIDSVKG

SEQ ID NO: 1163 - protein, 16 aa, synthetic construct
  REGION 1..16: note = Synthetic Construct
GISADGSTLYIDSVKG

SEQ ID NO: 1164 - protein, 16 aa, synthetic construct
  REGION 1..16: note = Synthetic Construct
GISADGRTDYIDSVKG

SEQ ID NO: 1165 - protein, 16 aa, synthetic construct
  REGION 1..16: note = Synthetic Construct
GISADGSTIYIDSVKG

SEQ ID NO: 1166 - protein, 16 aa, synthetic construct
  REGION 1..16: note = Synthetic Construct
GISADGSTLYIDSVKG

SEQ ID NO: 1167 - protein, 16 aa, synthetic construct
  REGION 1..16: note = Synthetic Construct
GISRDGSTDYIDSVKG

SEQ ID NO: 1168 - protein, 16 aa, synthetic construct
  REGION 1..16: note = Synthetic Construct
GISKDGSTDYIDSVKG

SEQ ID NO: 1169 - protein, 16 aa, synthetic construct
  REGION 1..16: note = Synthetic Construct
GISADGSTDYIGSVKG

SEQ ID NO: 1170 - protein, 16 aa, synthetic construct
  REGION 1..16: note = Synthetic Construct
GISVDGSTDYIDSVKG

SEQ ID NO: 1171 - protein, 16 aa, synthetic construct
  REGION 1..16: note = Synthetic Construct
GISADGSTGYIDSVKG

SEQ ID NO: 1172 - protein, 16 aa, synthetic construct
  REGION 1..16: note = Synthetic Construct
GISGDGSTTYIDSVKG

SEQ ID NO: 1173 - protein, 16 aa, synthetic construct
  REGION 1..16: note = Synthetic Construct
GISTDGSTDYIDSVKG

SEQ ID NO: 1174 - protein, 16 aa, synthetic construct
  REGION 1..16: note = Synthetic Construct
GISADGSTDYFDSVKG

SEQ ID NO: 1175 - protein, 16 aa, synthetic construct
  REGION 1..16: note = Synthetic Construct
GISADGSTSYIDSVKG

SEQ ID NO: 1176 - protein, 16 aa, synthetic construct
  REGION 1..16: note = Synthetic Construct
GISADGSTDYIDSVKG

SEQ ID NO: 1177 - protein, 16 aa, synthetic construct
  REGION 1..16: note = Synthetic Construct
GISADGSTAYIDSVKG

SEQ ID NO: 1178 - protein, 16 aa, synthetic construct
  REGION 1..16: note = Synthetic Construct
GISADGSTVYIDSVKG

SEQ ID NO: 1179 - protein, 16 aa, synthetic construct
  REGION 1..16: note = Synthetic Construct
GISQDGSTDYIDSVKG

SEQ ID NO: 1180 - protein, 16 aa, synthetic construct
  REGION 1..16: note = Synthetic Construct
GISNDGSTDYIDSVKG

SEQ ID NO: 1181 - protein, 16 aa, synthetic construct
  REGION 1..16: note = Synthetic Construct
GISARGSTDYIDSVKG

SEQ ID NO: 1182 - protein, 16 aa, synthetic construct
  REGION 1..16: note = Synthetic Construct
GISADGSTDYIDSVKG

SEQ ID NO: 1183 - protein, 16 aa, synthetic construct
  REGION 1..16: note = Synthetic Construct
GISRDGSTDYIDSVKG

SEQ ID NO: 1184 - protein, 16 aa, synthetic construct
  REGION 1..16: note = Synthetic Construct
GISADGSTLYIDSVKG

SEQ ID NO: 1185 - protein, 16 aa, synthetic construct
  REGION 1..16: note = Synthetic Construct
GISADGSTNYIDSVKG

SEQ ID NO: 1186 - protein, 16 aa, synthetic construct
  REGION 1..16: note = Synthetic Construct
GISADGSTVYIDSVKG

SEQ ID NO: 1187 - protein, 16 aa, synthetic construct
  REGION 1..16: note = Synthetic Construct
GISADGSTTYIDSVKG

SEQ ID NO: 1188 - protein, 16 aa, synthetic construct
  REGION 1..16: note = Synthetic Construct
GISADGSTDYIGSVKG

SEQ ID NO: 1189 - protein, 16 aa, synthetic construct
  REGION 1..16: note = Synthetic Construct
GISRDGSTDYIDSVKG

SEQ ID NO: 1190 - protein, 16 aa, synthetic construct
  REGION 1..16: note = Synthetic Construct
GISADGSTTYIDSVKG

SEQ ID NO: 1191 - protein, 16 aa, synthetic construct
  REGION 1..16: note = Synthetic Construct
GVSSDGSTDYIDSVKG

SEQ ID NO: 1192 - protein, 16 aa, synthetic construct
  REGION 1..16: note = Synthetic Construct
GISADGHTDYIDSVKG

SEQ ID NO: 1193 - protein, 16 aa, synthetic construct
  REGION 1..16: note = Synthetic Construct
GISADGSTDYFDSVKG

SEQ ID NO: 1194 - protein, 16 aa, synthetic construct
  REGION 1..16: note = Synthetic Construct
GISADGSTVYIDSVKG

SEQ ID NO: 1195 - protein, 16 aa, synthetic construct
  REGION 1..16: note = Synthetic Construct
GISADGSTDYIASVKG

SEQ ID NO: 1196 - protein, 16 aa, synthetic construct
  REGION 1..16: note = Synthetic Construct
GISADGSTDYISSVKG

SEQ ID NO: 1197 - protein, 16 aa, synthetic construct
  REGION 1..16: note = Synthetic Construct
GISADGSTVYIDSVKG

SEQ ID NO: 1198 - protein, 16 aa, synthetic construct
  REGION 1..16: note = Synthetic Construct
GISADGSTVYIDSVKG

SEQ ID NO: 1199 - protein, 16 aa, synthetic construct
  REGION 1..16: note = Synthetic Construct
GISADGSTTYIDSVKG

SEQ ID NO: 1200 - protein, 16 aa, synthetic construct
  REGION 1..16: note = Synthetic Construct
GISVDGSTDYIDSVKG

SEQ ID NO: 1201 - protein, 16 aa, synthetic construct
  REGION 1..16: note = Synthetic Construct
GISADGSTAYIDSVKG

SEQ ID NO: 1202 - protein, 16 aa, synthetic construct
  REGION 1..16: note = Synthetic Construct
GISADGSTAYIDSVKG

SEQ ID NO: 1203 - protein, 16 aa, synthetic construct
  REGION 1..16: note = Synthetic Construct
GISADGSKDYIDSVKG

SEQ ID NO: 1204 - protein, 16 aa, synthetic construct
  REGION 1..16: note = Synthetic Construct
GISADGSTDYFDSVKG

SEQ ID NO: 1205 - protein, 16 aa, synthetic construct
  REGION 1..16: note = Synthetic Construct
GISADGSTDYIDSVKG

SEQ ID NO: 1206 - protein, 16 aa, synthetic construct
  REGION 1..16: note = Synthetic Construct
GISADGSTVYIDSVKG

SEQ ID NO: 1207 - protein, 16 aa, synthetic construct
  REGION 1..16: note = Synthetic Construct
GISADGSTVYIDSVKG

SEQ ID NO: 1208 - protein, 16 aa, synthetic construct
  REGION 1..16: note = Synthetic Construct
GISARGSTDYIDSVKG

SEQ ID NO: 1209 - protein, 16 aa, synthetic construct
  REGION 1..16: note = Synthetic Construct
GISATGSTDYIDSVKG

SEQ ID NO: 1210 - protein, 16 aa, synthetic construct
  REGION 1..16: note = Synthetic Construct
GISKDGSTDYIDSVKG

SEQ ID NO: 1211 - protein, 16 aa, synthetic construct
  REGION 1..16: note = Synthetic Construct
GISADGSTVYIDSVKG

SEQ ID NO: 1212 - protein, 16 aa, synthetic construct
  REGION 1..16: note = Synthetic Construct
GISPDGSTDYIDSVKG

SEQ ID NO: 1213 - protein, 16 aa, synthetic construct
  REGION 1..16: note = Synthetic Construct
GISADGSTHYIDSVKG

SEQ ID NO: 1214 - protein, 16 aa, synthetic construct
  REGION 1..16: note = Synthetic Construct
GISADGSTDYILSVKG

SEQ ID NO: 1215 - protein, 16 aa, synthetic construct
  REGION 1..16: note = Synthetic Construct
GISADGSTDYIHSVKG

SEQ ID NO: 1216 - protein, 16 aa, synthetic construct
  REGION 1..16: note = Synthetic Construct
GISVDGSTDYIDSVKG

SEQ ID NO: 1217 - protein, 16 aa, synthetic construct
  REGION 1..16: note = Synthetic Construct
GISRDGSTDYIDSVKG

SEQ ID NO: 1218 - protein, 16 aa, synthetic construct
  REGION 1..16: note = Synthetic Construct
GISADGSTVYIDSVKG

SEQ ID NO: 1219 - protein, 16 aa, synthetic construct
  REGION 1..16: note = Synthetic Construct
GISADGSTDYIRSVKG

SEQ ID NO: 1220 - protein, 16 aa, synthetic construct
  REGION 1..16: note = Synthetic Construct
GISADGSTMYIDSVKG

SEQ ID NO: 1221 - protein, 16 aa, synthetic construct
  REGION 1..16: note = Synthetic Construct
GISTDGSTDYIDSVKG

SEQ ID NO: 1222 - protein, 16 aa, synthetic construct
  REGION 1..16: note = Synthetic Construct
GISADGSTLYIDSVKG

SEQ ID NO: 1223 - protein, 16 aa, synthetic construct
  REGION 1..16: note = Synthetic Construct
GISADGSTDYIDSVKG

SEQ ID NO: 1224 - protein, 16 aa, synthetic construct
  REGION 1..16: note = Synthetic Construct
GISATGSTDYIDSVKG

SEQ ID NO: 1225 - protein, 16 aa, synthetic construct
  REGION 1..16: note = Synthetic Construct
GISHDGSTDYIDSVKG

SEQ ID NO: 1226 - protein, 16 aa, synthetic construct
  REGION 1..16: note = Synthetic Construct
GISYDGSTDYIDSVKG

SEQ ID NO: 1227 - protein, 16 aa, synthetic construct
  REGION 1..16: note = Synthetic Construct
GISTDGSTDYIDSVKG

SEQ ID NO: 1228 - protein, 16 aa, synthetic construct
  REGION 1..16: note = Synthetic Construct
GISADGSTAYIDSVKG

SEQ ID NO: 1229 - protein, 16 aa, synthetic construct
  REGION 1..16: note = Synthetic Construct
GISADGSTDYIESVKG

SEQ ID NO: 1230 - protein, 16 aa, synthetic construct
  REGION 1..16: note = Synthetic Construct
GISIDGSTDYIKSVKG

SEQ ID NO: 1231 - protein, 16 aa, synthetic construct
  REGION 1..16: note = Synthetic Construct
GISADGSKDYIDSVKG

SEQ ID NO: 1232 - protein, 16 aa, synthetic construct
  REGION 1..16: note = Synthetic Construct
GISADGSTVYIDSVKG

SEQ ID NO: 1233 - protein, 16 aa, synthetic construct
  REGION 1..16: note = Synthetic Construct
GISRDGSTDYIDSVKG

SEQ ID NO: 1234 - protein, 16 aa, synthetic construct
  REGION 1..16: note = Synthetic Construct
GISADGSTDYIHSVKG

SEQ ID NO: 1235 - protein, 16 aa, synthetic construct
  REGION 1..16: note = Synthetic Construct
GISADGSTIYIDSVKG

SEQ ID NO: 1236 - protein, 16 aa, synthetic construct
  REGION 1..16: note = Synthetic Construct
GISANGSTDYIDSVKG

SEQ ID NO: 1237 - protein, 16 aa, synthetic construct
  REGION 1..16: note = Synthetic Construct
GISTDGSTDYIDSVKG

SEQ ID NO: 1238 - protein, 16 aa, synthetic construct
  REGION 1..16: note = Synthetic Construct
GISYDGSTDYIDSVKG

SEQ ID NO: 1239 - protein, 16 aa, synthetic construct
  REGION 1..16: note = Synthetic Construct
GISADGSTDYIASVKG

SEQ ID NO: 1240 - protein, 16 aa, synthetic construct
  REGION 1..16: note = Synthetic Construct
GISADGSTDYIGSVKG

SEQ ID NO: 1241 - protein, 16 aa, synthetic construct
  REGION 1..16: note = Synthetic Construct
GISANGSTDYYDSVKG

SEQ ID NO: 1242 - protein, 16 aa, synthetic construct
  REGION 1..16: note = Synthetic Construct
GISADGSTSYIDSVKG

SEQ ID NO: 1243 - protein, 16 aa, synthetic construct
  REGION 1..16: note = Synthetic Construct
GVSADGSTDYIDSVKG

SEQ ID NO: 1244 - protein, 16 aa, synthetic construct
  REGION 1..16: note = Synthetic Construct
GISARGSTDYIDSVKG

SEQ ID NO: 1245 - protein, 16 aa, synthetic construct
  REGION 1..16: note = Synthetic Construct
GISADGSTIYIDSVKG

SEQ ID NO: 1246 - protein, 16 aa, synthetic construct
  REGION 1..16: note = Synthetic Construct
GISANGSTDYIDSVKG

SEQ ID NO: 1247 - protein, 16 aa, synthetic construct
  REGION 1..16: note = Synthetic Construct
GISADGSTDYVDSVKG

SEQ ID NO: 1248 - protein, 16 aa, synthetic construct
  REGION 1..16: note = Synthetic Construct
GISADGSTDYRDSVKG

SEQ ID NO: 1249 - protein, 16 aa, synthetic construct
  REGION 1..16: note = Synthetic Construct
GISVDGSTDYIDSVKG

SEQ ID NO: 1250 - protein, 16 aa, synthetic construct
  REGION 1..16: note = Synthetic Construct
GISADGSTDYILSVKG

SEQ ID NO: 1251 - protein, 16 aa, synthetic construct
  REGION 1..16: note = Synthetic Construct
GISVDGSTDYIDSVKG

SEQ ID NO: 1252 - protein, 16 aa, synthetic construct
  REGION 1..16: note = Synthetic Construct
GISSDGSKVFNESVKG

SEQ ID NO: 1253 - protein, 16 aa, synthetic construct
  REGION 1..16: note = Synthetic Construct
GISSDGSEVYTDSVKG

SEQ ID NO: 1254 - protein, 16 aa, synthetic construct
  REGION 1..16: note = Synthetic Construct
GISSDDSNVYYESVKG

SEQ ID NO: 1255 - protein, 16 aa, synthetic construct
  REGION 1..16: note = Synthetic Construct
GISSDGSKVYADSVKG

SEQ ID NO: 1256 - protein, 16 aa, synthetic construct
  REGION 1..16: note = Synthetic Construct
GISSDESTLYVDSVKG

SEQ ID NO: 1257 - protein, 16 aa, synthetic construct
  REGION 1..16: note = Synthetic Construct
GISSDDSKVYSDSVKG

SEQ ID NO: 1258 - protein, 16 aa, synthetic construct
  REGION 1..16: note = Synthetic Construct
GISSDGSQVYGASVKG

SEQ ID NO: 1259 - protein, 16 aa, synthetic construct
  REGION 1..16: note = Synthetic Construct
GISSDGSKVYADSVKG

SEQ ID NO: 1260 - protein, 16 aa, synthetic construct
  REGION 1..16: note = Synthetic Construct
GISSDGSNMYADSVKG

SEQ ID NO: 1261 - protein, 16 aa, synthetic construct
  REGION 1..16: note = Synthetic Construct
GISSDGSKVYTDSVKG

SEQ ID NO: 1262 - protein, 16 aa, synthetic construct
  REGION 1..16: note = Synthetic Construct
GISSDGSKVSAESVKG

SEQ ID NO: 1263 - protein, 16 aa, synthetic construct
  REGION 1..16: note = Synthetic Construct
GISSDGSKVYDDSVKG

SEQ ID NO: 1264 - protein, 16 aa, synthetic construct
  REGION 1..16: note = Synthetic Construct
GISSDGSKVYDDSVKG

SEQ ID NO: 1265 - protein, 16 aa, synthetic construct
  REGION 1..16: note = Synthetic Construct
GISSDGSAVYVGSVKG

SEQ ID NO: 1266 - protein, 16 aa, synthetic construct
  REGION 1..16: note = Synthetic Construct
GISSDGSYVYSESVKG

SEQ ID NO: 1267 - protein, 16 aa, synthetic construct
  REGION 1..16: note = Synthetic Construct
GISSDSSHVYADSVKG

SEQ ID NO: 1268 - protein, 16 aa, synthetic construct
  REGION 1..16: note = Synthetic Construct
GISSDSSIVYTDSVKG

SEQ ID NO: 1269 - protein, 16 aa, synthetic construct
  REGION 1..16: note = Synthetic Construct
GISSDGSEVNTDSVKG

SEQ ID NO: 1270 - protein, 16 aa, synthetic construct
  REGION 1..16: note = Synthetic Construct
GISSDGSKLSSDSVKG

SEQ ID NO: 1271 - protein, 16 aa, synthetic construct
  REGION 1..16: note = Synthetic Construct
GISSDNSKVYADSVKG

SEQ ID NO: 1272 - protein, 16 aa, synthetic construct
  REGION 1..16: note = Synthetic Construct
GISSDGSRVYFDSVKG

SEQ ID NO: 1273 - protein, 16 aa, synthetic construct
  REGION 1..16: note = Synthetic Construct
GISSDGSLVYAESVKG

SEQ ID NO: 1274 - protein, 16 aa, synthetic construct
  REGION 1..16: note = Synthetic Construct
GISSDGSVVYVDSVKG

SEQ ID NO: 1275 - protein, 16 aa, synthetic construct
  REGION 1..16: note = Synthetic Construct
GISSDGSKVYVDSVKG

SEQ ID NO: 1276 - protein, 16 aa, synthetic construct
  REGION 1..16: note = Synthetic Construct
GISSDGSKLYDESVKG

SEQ ID NO: 1277 - protein, 16 aa, synthetic construct
  REGION 1..16: note = Synthetic Construct
GISSDYSKLYADSVKG

SEQ ID NO: 1278 - protein, 16 aa, synthetic construct
  REGION 1..16: note = Synthetic Construct
GISSDSSKVYTESVKG

SEQ ID NO: 1279 - protein, 16 aa, synthetic construct
  REGION 1..16: note = Synthetic Construct
GISSDGSQVYVDSVKG

SEQ ID NO: 1280 - protein, 16 aa, synthetic construct
  REGION 1..16: note = Synthetic Construct
GISSDGSKVYSDSVKG

SEQ ID NO: 1281 - protein, 16 aa, synthetic construct
  REGION 1..16: note = Synthetic Construct
GISSDGSKVYVDSVKG

SEQ ID NO: 1282 - protein, 16 aa, synthetic construct
  REGION 1..16: note = Synthetic Construct
GISSDGSKVYADSVKG

SEQ ID NO: 1283 - protein, 16 aa, synthetic construct
  REGION 1..16: note = Synthetic Construct
GISSDGSSVYADSVKG

SEQ ID NO: 1284 - protein, 16 aa, synthetic construct
  REGION 1..16: note = Synthetic Construct
GISSDGSQVYYGSVKG

SEQ ID NO: 1285 - protein, 16 aa, synthetic construct
  REGION 1..16: note = Synthetic Construct
GISSDGSKVYTDSVKG

SEQ ID NO: 1286 - protein, 16 aa, synthetic construct
  REGION 1..16: note = Synthetic Construct
GISSDGSKVSADSVKG

SEQ ID NO: 1287 - protein, 16 aa, synthetic construct
  REGION 1..16: note = Synthetic Construct
GISSDGSKVYEDSVKG

SEQ ID NO: 1288 - protein, 16 aa, synthetic construct
  REGION 1..16: note = Synthetic Construct
GISSDRSKVYADSVKG

SEQ ID NO: 1289 - protein, 16 aa, synthetic construct
  REGION 1..16: note = Synthetic Construct
GISSDGSKVYAESVKG

SEQ ID NO: 1290 - protein, 16 aa, synthetic construct
  REGION 1..16: note = Synthetic Construct
GISSDGSVVTTESVKG

SEQ ID NO: 1291 - protein, 16 aa, synthetic construct
  REGION 1..16: note = Synthetic Construct
GISSDGSHVHQESVKG

SEQ ID NO: 1292 - protein, 16 aa, synthetic construct
  REGION 1..16: note = Synthetic Construct
GISADGSTVYVESVKG

SEQ ID NO: 1293 - protein, 16 aa, synthetic construct
  REGION 1..16: note = Synthetic Construct
GISSDGSTVYIDSVKG

SEQ ID NO: 1294 - protein, 16 aa, synthetic construct
  REGION 1..16: note = Synthetic Construct
GISVDGSTHYVASVKG

SEQ ID NO: 1295 - protein, 16 aa, synthetic construct
  REGION 1..16: note = Synthetic Construct
GISTDGSKHYIDSVKG

SEQ ID NO: 1296 - protein, 16 aa, synthetic construct
  REGION 1..16: note = Synthetic Construct
GISYDGSKYYAESVKG

SEQ ID NO: 1297 - protein, 16 aa, synthetic construct
  REGION 1..16: note = Synthetic Construct
GISANGSRTYMESVKG

SEQ ID NO: 1298 - protein, 16 aa, synthetic construct
  REGION 1..16: note = Synthetic Construct
GISPDGSTDYVDSVKG

SEQ ID NO: 1299 - protein, 16 aa, synthetic construct
  REGION 1..16: note = Synthetic Construct
GISPNGSAVYTESVKG

SEQ ID NO: 1300 - protein, 16 aa, synthetic construct
  REGION 1..16: note = Synthetic Construct
GISPDGSTAYMESVKG

SEQ ID NO: 1301 - protein, 16 aa, synthetic construct
  REGION 1..16: note = Synthetic Construct
GISNDGSTDYIDSVKG

SEQ ID NO: 1302 - protein, 16 aa, synthetic construct
  REGION 1..16: note = Synthetic Construct
GISTDGSAVYFDSVKG

SEQ ID NO: 1303 - protein, 16 aa, synthetic construct
  REGION 1..16: note = Synthetic Construct
GISTGGSTHYIESVKG

SEQ ID NO: 1304 - protein, 16 aa, synthetic construct
  REGION 1..16: note = Synthetic Construct
GISTDGSTVYIDSVKG

SEQ ID NO: 1305 - protein, 16 aa, synthetic construct
  REGION 1..16: note = Synthetic Construct
GISNEGSTYYMDSVKG

SEQ ID NO: 1306 - protein, 16 aa, synthetic construct
  REGION 1..16: note = Synthetic Construct
GISADGSHVYTNSVKG

SEQ ID NO: 1307 - protein, 16 aa, synthetic construct
  REGION 1..16: note = Synthetic Construct
GISDDGSRYYTDSVKG

SEQ ID NO: 1308 - protein, 16 aa, synthetic construct
  REGION 1..16: note = Synthetic Construct
GISAEGSTLYMESVKG

SEQ ID NO: 1309 - protein, 16 aa, synthetic construct
  REGION 1..16: note = Synthetic Construct
GISTDGSTVYIDSVKG

SEQ ID NO: 1310 - protein, 16 aa, synthetic construct
  REGION 1..16: note = Synthetic Construct
GISANGSTSYIDSVKG

SEQ ID NO: 1311 - protein, 16 aa, synthetic construct
  REGION 1..16: note = Synthetic Construct
GISDDGSRHYIESVKG

SEQ ID NO: 1312 - protein, 16 aa, synthetic construct
  REGION 1..16: note = Synthetic Construct
GISPDGSTVYIESVKG

SEQ ID NO: 1313 - protein, 16 aa, synthetic construct
  REGION 1..16: note = Synthetic Construct
GISDDGSTVYVDSVKG

SEQ ID NO: 1314 - protein, 16 aa, synthetic construct
  REGION 1..16: note = Synthetic Construct
GISDDGSTVYFDSVKG

SEQ ID NO: 1315 - protein, 16 aa, synthetic construct
  REGION 1..16: note = Synthetic Construct
GISDEGSTVYIGSVKG

SEQ ID NO: 1316 - protein, 16 aa, synthetic construct
  REGION 1..16: note = Synthetic Construct
GISDDGSIVYMDSVKG

SEQ ID NO: 1317 - protein, 16 aa, synthetic construct
  REGION 1..16: note = Synthetic Construct
GISDDGSKHYFDSVKG

SEQ ID NO: 1318 - protein, 16 aa, synthetic construct
  REGION 1..16: note = Synthetic Construct
GISTDGSTDYLHSVKG

SEQ ID NO: 1319 - protein, 16 aa, synthetic construct
  REGION 1..16: note = Synthetic Construct
GISDDGSKHYFDSVKG

SEQ ID NO: 1320 - protein, 16 aa, synthetic construct
  REGION 1..16: note = Synthetic Construct
GISYDGSTVYVESVKG

SEQ ID NO: 1321 - protein, 16 aa, synthetic construct
  REGION 1..16: note = Synthetic Construct
GISDDGSTVYIDSVKG

SEQ ID NO: 1322 - protein, 16 aa, synthetic construct
  REGION 1..16: note = Synthetic Construct
GISDDGSTVYVDSVKG

SEQ ID NO: 1323 - protein, 16 aa, synthetic construct
  REGION 1..16: note = Synthetic Construct
GISDDGSQVYIDSVKG

SEQ ID NO: 1324 - protein, 16 aa, synthetic construct
  REGION 1..16: note = Synthetic Construct
GISVDGSTVYSDSVKG

SEQ ID NO: 1325 - protein, 16 aa, synthetic construct
  REGION 1..16: note = Synthetic Construct
GISDDGSNVYIDSVKG

SEQ ID NO: 1326 - protein, 16 aa, synthetic construct
  REGION 1..16: note = Synthetic Construct
GISTDGSTVYFVSVKG

SEQ ID NO: 1327 - protein, 7 aa, synthetic construct
  REGION 1..7: note = Synthetic Construct
RYFERTD

SEQ ID NO: 1328 - protein, 7 aa, synthetic construct
  REGION 1..7: note = Synthetic Construct
RYFERTD

SEQ ID NO: 1329 - protein, 7 aa, synthetic construct
  REGION 1..7: note = Synthetic Construct
RYFERTD

SEQ ID NO: 1330 - protein, 7 aa, synthetic construct
  REGION 1..7: note = Synthetic Construct
YQGLYAY

SEQ ID NO: 1331 - protein, 7 aa, synthetic construct
  REGION 1..7: note = Synthetic Construct
RVFDHVY

SEQ ID NO: 1332 - protein, 7 aa, synthetic construct
  REGION 1..7: note = Synthetic Construct
RAFGRDY

SEQ ID NO: 1333 - protein, 7 aa, synthetic construct
  REGION 1..7: note = Synthetic Construct
RTMGRDY

SEQ ID NO: 1334 - protein, 8 aa, synthetic construct
  REGION 1..8: note = Synthetic Construct
WDGVGGAY

SEQ ID NO: 1335 - protein, 8 aa, synthetic construct
  REGION 1..8: note = Synthetic Construct
WDGVGGAY

SEQ ID NO: 1336 - protein, 8 aa, synthetic construct
  REGION 1..8: note = Synthetic Construct
WNGVGGAY

SEQ ID NO: 1337 - protein, 8 aa, synthetic construct
  REGION 1..8: note = Synthetic Construct
WDGVGGAY

SEQ ID NO: 1338 - protein, 8 aa, synthetic construct
  REGION 1..8: note = Synthetic Construct
WDGVGGAY

SEQ ID NO: 1339 - protein, 6 aa, synthetic construct
  REGION 1..6: note = Synthetic Construct
RSWNNY

SEQ ID NO: 1340 - protein, 6 aa, synthetic construct
  REGION 1..6: note = Synthetic Construct
RSWNNY

SEQ ID NO: 1341 - protein, 6 aa, synthetic construct
  REGION 1..6: note = Synthetic Construct
RSWNNY

SEQ ID NO: 1342 - protein, 9 aa, synthetic construct
  REGION 1..9: note = Synthetic Construct
ESFGRIWYN

SEQ ID NO: 1343 - protein, 7 aa, synthetic construct
  REGION 1..7: note = Synthetic Construct
QHFGTDS

SEQ ID NO: 1344 - protein, 7 aa, synthetic construct
  REGION 1..7: note = Synthetic Construct
QQFGTDS

SEQ ID NO: 1345 - protein, 9 aa, synthetic construct
  REGION 1..9: note = Synthetic Construct
YGIQRAEGY

SEQ ID NO: 1346 - protein, 9 aa, synthetic construct
  REGION 1..9: note = Synthetic Construct
YRWVGRDTY

SEQ ID NO: 1347 - protein, 9 aa, synthetic construct
  REGION 1..9: note = Synthetic Construct
YRWVGRDTY

SEQ ID NO: 1348 - protein, 9 aa, synthetic construct
  REGION 1..9: note = Synthetic Construct
YRWVGRDTY

SEQ ID NO: 1349 - protein, 9 aa, synthetic construct
  REGION 1..9: note = Synthetic Construct
YRWEGRDTY

SEQ ID NO: 1350 - protein, 9 aa, synthetic construct
  REGION 1..9: note = Synthetic Construct
YRWEGRNTY

SEQ ID NO: 1351 - protein, 9 aa, synthetic construct
  REGION 1..9: note = Synthetic Construct
YRWVGRYTY

SEQ ID NO: 1352 - protein, 9 aa, synthetic construct
  REGION 1..9: note = Synthetic Construct
YRWVGRDTY

SEQ ID NO: 1353 - protein, 9 aa, synthetic construct
  REGION 1..9: note = Synthetic Construct
YRWVGRDTY

SEQ ID NO: 1354 - protein, 9 aa, synthetic construct
  REGION 1..9: note = Synthetic Construct
YRWVGRDTY

SEQ ID NO: 1355 - protein, 9 aa, synthetic construct
  REGION 1..9: note = Synthetic Construct
YRWVDRYTY

SEQ ID NO: 1356 - protein, 9 aa, synthetic construct
  REGION 1..9: note = Synthetic Construct
YRWIDRYTY

SEQ ID NO: 1357 - protein, 9 aa, synthetic construct
  REGION 1..9: note = Synthetic Construct
YRWVDRYTY

SEQ ID NO: 1358 - protein, 9 aa, synthetic construct
  REGION 1..9: note = Synthetic Construct
YRWVGRDTY

SEQ ID NO: 1359 - protein, 9 aa, synthetic construct
  REGION 1..9: note = Synthetic Construct
YRWTTRYTY

SEQ ID NO: 1360 - protein, 9 aa, synthetic construct
  REGION 1..9: note = Synthetic Construct
YRWVGGYTY

SEQ ID NO: 1361 - protein, 11 aa, synthetic construct
  REGION 1..11: note = Synthetic Construct
FRTVAASSMQY

SEQ ID NO: 1362 - protein, 11 aa, synthetic construct
  REGION 1..11: note = Synthetic Construct
FRTVSGSSMRY

SEQ ID NO: 1363 - protein, 10 aa, synthetic construct
  REGION 1..10: note = Synthetic Construct
NRGFAGAPSY

SEQ ID NO: 1364 - protein, 6 aa, synthetic construct
  REGION 1..6: note = Synthetic Construct
YFQSSY

SEQ ID NO: 1365 - protein, 6 aa, synthetic construct
  REGION 1..6: note = Synthetic Construct
YFQSSY

SEQ ID NO: 1366 - protein, 6 aa, synthetic construct
  REGION 1..6: note = Synthetic Construct
YFQSSY

SEQ ID NO: 1367 - protein, 11 aa, synthetic construct
  REGION 1..11: note = Synthetic Construct
HWTQGSVPKES

SEQ ID NO: 1368 - protein, 7 aa, synthetic construct
  REGION 1..7: note = Synthetic Construct
RSYSSDY

SEQ ID NO: 1369 - protein, 7 aa, synthetic construct
  REGION 1..7: note = Synthetic Construct
RYGDINY

SEQ ID NO: 1370 - protein, 7 aa, synthetic construct
  REGION 1..7: note = Synthetic Construct
RYGDINY

SEQ ID NO: 1371 - protein, 6 aa, synthetic construct
  REGION 1..6: note = Synthetic Construct
YDSRSY

SEQ ID NO: 1372 - protein, 7 aa, synthetic construct
  REGION 1..7: note = Synthetic Construct
YDNINAY

SEQ ID NO: 1373 - protein, 7 aa, synthetic construct
  REGION 1..7: note = Synthetic Construct
YDNINAY

SEQ ID NO: 1374 - protein, 7 aa, synthetic construct
  REGION 1..7: note = Synthetic Construct
YDNINAY

SEQ ID NO: 1375 - protein, 7 aa, synthetic construct
  REGION 1..7: note = Synthetic Construct
YDNINAY

SEQ ID NO: 1376 - protein, 7 aa, synthetic construct
  REGION 1..7: note = Synthetic Construct
WIAGKAY

SEQ ID NO: 1377 - protein, 7 aa, synthetic construct
  REGION 1..7: note = Synthetic Construct
RSQLGST

SEQ ID NO: 1378 - protein, 8 aa, synthetic construct
  REGION 1..8: note = Synthetic Construct
YYLDTYAY

SEQ ID NO: 1379 - protein, 7 aa, synthetic construct
  REGION 1..7: note = Synthetic Construct
RYFERTD

SEQ ID NO: 1380 - protein, 6 aa, synthetic construct
  REGION 1..6: note = Synthetic Construct
YFQSSY

SEQ ID NO: 1381 - protein, 9 aa, synthetic construct
  REGION 1..9: note = Synthetic Construct
YRWVGRDTY

SEQ ID NO: 1382 - protein, 7 aa, synthetic construct
  REGION 1..7: note = Synthetic Construct
WIAGKAY

SEQ ID NO: 1383 - protein, 8 aa, synthetic construct
  REGION 1..8: note = Synthetic Construct
WNGVGGAY

SEQ ID NO: 1384 - protein, 8 aa, synthetic construct
  REGION 1..8: note = Synthetic Construct
WDGVGGAY

SEQ ID NO: 1385 - protein, 7 aa, synthetic construct
  REGION 1..7: note = Synthetic Construct
RAFGRDY

SEQ ID NO: 1386 - protein, 11 aa, synthetic construct
  REGION 1..11: note = Synthetic Construct
FRTVAASSMQY

SEQ ID NO: 1387 - protein, 6 aa, synthetic construct
  REGION 1..6: note = Synthetic Construct
RSWNNY

SEQ ID NO: 1388 - protein, 6 aa, synthetic construct
  REGION 1..6: note = Synthetic Construct
YFQSSY

SEQ ID NO: 1389 - protein, 7 aa, synthetic construct
  REGION 1..7: note = Synthetic Construct
QHFGTDS

SEQ ID NO: 1390 - protein, 7 aa, synthetic construct
  REGION 1..7: note = Synthetic Construct
RSQLGST

SEQ ID NO: 1391 - protein, 7 aa, synthetic construct
  REGION 1..7: note = Synthetic Construct
YQGLYAY

SEQ ID NO: 1392 - protein, 7 aa, synthetic construct
  REGION 1..7: note = Synthetic Construct
YDNINAY

SEQ ID NO: 1393 - protein, 11 aa, synthetic construct
  REGION 1..11: note = Synthetic Construct
HWTQGSVPKES

SEQ ID NO: 1394 - protein, 11 aa, synthetic construct
  REGION 1..11: note = Synthetic Construct
FRTVSGSSMRY

SEQ ID NO: 1395 - protein, 7 aa, synthetic construct
  REGION 1..7: note = Synthetic Construct
RSYSSDY

SEQ ID NO: 1396 - protein, 6 aa, synthetic construct
  REGION 1..6: note = Synthetic Construct
RSWNNY

SEQ ID NO: 1397 - protein, 7 aa, synthetic construct
  REGION 1..7: note = Synthetic Construct
QQFGTDS

SEQ ID NO: 1398 - protein, 9 aa, synthetic construct
  REGION 1..9: note = Synthetic Construct
YGIQRAEGY

SEQ ID NO: 1399 - protein, 9 aa, synthetic construct
  REGION 1..9: note = Synthetic Construct
YRWVGRYTY

SEQ ID NO: 1400 - protein, 7 aa, synthetic construct
  REGION 1..7: note = Synthetic Construct
RYGDINY

SEQ ID NO: 1401 - protein, 9 aa, synthetic construct
  REGION 1..9: note = Synthetic Construct
YRWTTRYTY

SEQ ID NO: 1402 - protein, 8 aa, synthetic construct
  REGION 1..8: note = Synthetic Construct
YYLDTYAY

SEQ ID NO: 1403 - protein, 9 aa, synthetic construct
  REGION 1..9: note = Synthetic Construct
YRWEGRNTY

SEQ ID NO: 1404 - protein, 9 aa, synthetic construct
  REGION 1..9: note = Synthetic Construct
ESFGRIWYN

SEQ ID NO: 1405 - protein, 7 aa, synthetic construct
  REGION 1..7: note = Synthetic Construct
RYGDINY

SEQ ID NO: 1406 - protein, 7 aa, synthetic construct
  REGION 1..7: note = Synthetic Construct
RVFDHVY

SEQ ID NO: 1407 - protein, 6 aa, synthetic construct
  REGION 1..6: note = Synthetic Construct
YFQSSY

SEQ ID NO: 1408 - protein, 8 aa, synthetic construct
  REGION 1..8: note = Synthetic Construct
WDGVGGAY

SEQ ID NO: 1409 - protein, 9 aa, synthetic construct
  REGION 1..9: note = Synthetic Construct
YRWVGGYTY

SEQ ID NO: 1410 - protein, 6 aa, synthetic construct
  REGION 1..6: note = Synthetic Construct
YDSRSY

SEQ ID NO: 1411 - protein, 10 aa, synthetic construct
  REGION 1..10: note = Synthetic Construct
NRGFAGAPSY

SEQ ID NO: 1412 - protein, 7 aa, synthetic construct
  REGION 1..7: note = Synthetic Construct
RTMGRDY

SEQ ID NO: 1413 - protein, 11 aa, synthetic construct
  REGION 1..11: note = Synthetic Construct
FRHVSGSSMRY

SEQ ID NO: 1414 - protein, 11 aa, synthetic construct
  REGION 1..11: note = Synthetic Construct
FRTVSGSSSRY

SEQ ID NO: 1415 - protein, 11 aa, synthetic construct
  REGION 1..11: note = Synthetic Construct
FRTVSGSSMRY

SEQ ID NO: 1416 - protein, 11 aa, synthetic construct
  REGION 1..11: note = Synthetic Construct
FRTVRGSSMSY

SEQ ID NO: 1417 - protein, 11 aa, synthetic construct
  REGION 1..11: note = Synthetic Construct
FRTVSGSSKRY

SEQ ID NO: 1418 - protein, 11 aa, synthetic construct
  REGION 1..11: note = Synthetic Construct
FRMVSGSSMRY

SEQ ID NO: 1419 - protein, 11 aa, synthetic construct
  REGION 1..11: note = Synthetic Construct
FRTVQGSSMRY

SEQ ID NO: 1420 - protein, 11 aa, synthetic construct
  REGION 1..11: note = Synthetic Construct
FRTVYGSSMRY

SEQ ID NO: 1421 - protein, 11 aa, synthetic construct
  REGION 1..11: note = Synthetic Construct
FRTVSGSSYRY

SEQ ID NO: 1422 - protein, 11 aa, synthetic construct
  REGION 1..11: note = Synthetic Construct
FRTVLGSSMRY

SEQ ID NO: 1423 - protein, 11 aa, synthetic construct
  REGION 1..11: note = Synthetic Construct
FRRVSGSSMRY

SEQ ID NO: 1424 - protein, 11 aa, synthetic construct
  REGION 1..11: note = Synthetic Construct
FRTVSGSSMRY

SEQ ID NO: 1425 - protein, 11 aa, synthetic construct
  REGION 1..11: note = Synthetic Construct
FRTVSGSSARY

SEQ ID NO: 1426 - protein, 11 aa, synthetic construct
  REGION 1..11: note = Synthetic Construct
FRIVRGSSMRY

SEQ ID NO: 1427 - protein, 11 aa, synthetic construct
  REGION 1..11: note = Synthetic Construct
YRTVSGSSMRY

SEQ ID NO: 1428 - protein, 11 aa, synthetic construct
  REGION 1..11: note = Synthetic Construct
FRHVSGSSMRY

SEQ ID NO: 1429 - protein, 11 aa, synthetic construct
  REGION 1..11: note = Synthetic Construct
FRFVSGSSMRY

SEQ ID NO: 1430 - protein, 11 aa, synthetic construct
  REGION 1..11: note = Synthetic Construct
FRTVSGSSMRY

SEQ ID NO: 1431 - protein, 11 aa, synthetic construct
  REGION 1..11: note = Synthetic Construct
FRTKSGSSMRY

SEQ ID NO: 1432 - protein, 11 aa, synthetic construct
  REGION 1..11: note = Synthetic Construct
FRTVYGSSMRY

SEQ ID NO: 1433 - protein, 11 aa, synthetic construct
  REGION 1..11: note = Synthetic Construct
FRTVSGSSMGY

SEQ ID NO: 1434 - protein, 11 aa, synthetic construct
  REGION 1..11: note = Synthetic Construct
FRTVSGSSMRS

SEQ ID NO: 1435 - protein, 11 aa, synthetic construct
  REGION 1..11: note = Synthetic Construct
FRTVGGSSMRY

SEQ ID NO: 1436 - protein, 11 aa, synthetic construct
  REGION 1..11: note = Synthetic Construct
FRTVSGSSMRY

SEQ ID NO: 1437 - protein, 11 aa, synthetic construct
  REGION 1..11: note = Synthetic Construct
FRTVSGSHMRY

SEQ ID NO: 1438 - protein, 11 aa, synthetic construct
  REGION 1..11: note = Synthetic Construct
FRAVSGSSMRY

SEQ ID NO: 1439 - protein, 11 aa, synthetic construct
  REGION 1..11: note = Synthetic Construct
FRTVSGSSMRY

SEQ ID NO: 1440 - protein, 11 aa, synthetic construct
  REGION 1..11: note = Synthetic Construct
FRTVSGSPMRY

SEQ ID NO: 1441 - protein, 11 aa, synthetic construct
  REGION 1..11: note = Synthetic Construct
FRTVSGSSMSY

SEQ ID NO: 1442 - protein, 11 aa, synthetic construct
  REGION 1..11: note = Synthetic Construct
FRTVSGSSMRY

SEQ ID NO: 1443 - protein, 11 aa, synthetic construct
  REGION 1..11: note = Synthetic Construct
FRTVRGSSMRY

SEQ ID NO: 1444 - protein, 11 aa, synthetic construct
  REGION 1..11: note = Synthetic Construct
FRTVRGSSMRY

SEQ ID NO: 1445 - protein, 11 aa, synthetic construct
  REGION 1..11: note = Synthetic Construct
FRQVSGSSMRY

SEQ ID NO: 1446 - protein, 11 aa, synthetic construct
  REGION 1..11: note = Synthetic Construct
FRIVSGSSMGY

SEQ ID NO: 1447 - protein, 11 aa, synthetic construct
  REGION 1..11: note = Synthetic Construct
FRTVSGASMRY

SEQ ID NO: 1448 - protein, 11 aa, synthetic construct
  REGION 1..11: note = Synthetic Construct
FRTVHGSSMRY

SEQ ID NO: 1449 - protein, 11 aa, synthetic construct
  REGION 1..11: note = Synthetic Construct
FRMVSGSSMRY

SEQ ID NO: 1450 - protein, 11 aa, synthetic construct
  REGION 1..11: note = Synthetic Construct
FRTISGSSMRY

SEQ ID NO: 1451 - protein, 11 aa, synthetic construct
  REGION 1..11: note = Synthetic Construct
FRTRSGSSMRY

SEQ ID NO: 1452 - protein, 11 aa, synthetic construct
  REGION 1..11: note = Synthetic Construct
FRTVSGHSMRY

SEQ ID NO: 1453 - protein, 11 aa, synthetic construct
  REGION 1..11: note = Synthetic Construct
FRTVSGGSMRY

SEQ ID NO: 1454 - protein, 11 aa, synthetic construct
  REGION 1..11: note = Synthetic Construct
FRTKSGSSMRY

SEQ ID NO: 1455 - protein, 11 aa, synthetic construct
  REGION 1..11: note = Synthetic Construct
FRTASGTSMRY

SEQ ID NO: 1456 - protein, 11 aa, synthetic construct
  REGION 1..11: note = Synthetic Construct
FNTVSGSSMRY

SEQ ID NO: 1457 - protein, 11 aa, synthetic construct
  REGION 1..11: note = Synthetic Construct
FRTVRGSSQRY

SEQ ID NO: 1458 - protein, 11 aa, synthetic construct
  REGION 1..11: note = Synthetic Construct
FRTVLGSSMRY

SEQ ID NO: 1459 - protein, 11 aa, synthetic construct
  REGION 1..11: note = Synthetic Construct
FRTRSGSSMRY

SEQ ID NO: 1460 - protein, 11 aa, synthetic construct
  REGION 1..11: note = Synthetic Construct
FRTVSGLSMRY

SEQ ID NO: 1461 - protein, 11 aa, synthetic construct
  REGION 1..11: note = Synthetic Construct
FRTVRGSSQRY

SEQ ID NO: 1462 - protein, 11 aa, synthetic construct
  REGION 1..11: note = Synthetic Construct
FRTVSGSSMVY

SEQ ID NO: 1463 - protein, 11 aa, synthetic construct
  REGION 1..11: note = Synthetic Construct
FRTVSRSSMRY

SEQ ID NO: 1464 - protein, 11 aa, synthetic construct
  REGION 1..11: note = Synthetic Construct
FRTVSGSSMSY

SEQ ID NO: 1465 - protein, 11 aa, synthetic construct
  REGION 1..11: note = Synthetic Construct
FRTVSGSSARY

SEQ ID NO: 1466 - protein, 11 aa, synthetic construct
  REGION 1..11: note = Synthetic Construct
FHTVSGSSMRY

SEQ ID NO: 1467 - protein, 11 aa, synthetic construct
  REGION 1..11: note = Synthetic Construct
FRTVLGSSMRY

SEQ ID NO: 1468 - protein, 11 aa, synthetic construct
  REGION 1..11: note = Synthetic Construct
FRTVSGSSMRY

SEQ ID NO: 1469 - protein, 11 aa, synthetic construct
  REGION 1..11: note = Synthetic Construct
FRNVSGSSMRY

SEQ ID NO: 1470 - protein, 11 aa, synthetic construct
  REGION 1..11: note = Synthetic Construct
FRTVTGSSMRY

SEQ ID NO: 1471 - protein, 11 aa, synthetic construct
  REGION 1..11: note = Synthetic Construct
FRTVSGSSMRY

SEQ ID NO: 1472 - protein, 11 aa, synthetic construct
  REGION 1..11: note = Synthetic Construct
FRTVKGSSMRY

SEQ ID NO: 1473 - protein, 11 aa, synthetic construct
  REGION 1..11: note = Synthetic Construct
FRTNSGSSMRY

SEQ ID NO: 1474 - protein, 11 aa, synthetic construct
  REGION 1..11: note = Synthetic Construct
FRTVSGASMRY

SEQ ID NO: 1475 - protein, 11 aa, synthetic construct
  REGION 1..11: note = Synthetic Construct
FRTVNLSSMRY

SEQ ID NO: 1476 - protein, 11 aa, synthetic construct
  REGION 1..11: note = Synthetic Construct
FRTVTGSSMRY

SEQ ID NO: 1477 - protein, 11 aa, synthetic construct
  REGION 1..11: note = Synthetic Construct
FRKVSGSSARY

SEQ ID NO: 1478 - protein, 11 aa, synthetic construct
  REGION 1..11: note = Synthetic Construct
FRTYSGSSMRY

SEQ ID NO: 1479 - protein, 11 aa, synthetic construct
  REGION 1..11: note = Synthetic Construct
FRTVSKSSMRY

SEQ ID NO: 1480 - protein, 11 aa, synthetic construct
  REGION 1..11: note = Synthetic Construct
FKTVSGSSMRY

SEQ ID NO: 1481 - protein, 11 aa, synthetic construct
  REGION 1..11: note = Synthetic Construct
FRTRSGSSMRY

SEQ ID NO: 1482 - protein, 11 aa, synthetic construct
  REGION 1..11: note = Synthetic Construct
FRTSSGSSMRY

SEQ ID NO: 1483 - protein, 11 aa, synthetic construct
  REGION 1..11: note = Synthetic Construct
FRFLSGSSMRY

SEQ ID NO: 1484 - protein, 11 aa, synthetic construct
  REGION 1..11: note = Synthetic Construct
FRTVSGSSMRY

SEQ ID NO: 1485 - protein, 11 aa, synthetic construct
  REGION 1..11: note = Synthetic Construct
FRLVSGSSMRY

SEQ ID NO: 1486 - protein, 11 aa, synthetic construct
  REGION 1..11: note = Synthetic Construct
FRTVSGSSMRF

SEQ ID NO: 1487 - protein, 11 aa, synthetic construct
  REGION 1..11: note = Synthetic Construct
FRTQSGSSMRY

SEQ ID NO: 1488 - protein, 11 aa, synthetic construct
  REGION 1..11: note = Synthetic Construct
FRTVSGSSMPY

SEQ ID NO: 1489 - protein, 11 aa, synthetic construct
  REGION 1..11: note = Synthetic Construct
FRTLSGSSMRY

SEQ ID NO: 1490 - protein, 11 aa, synthetic construct
  REGION 1..11: note = Synthetic Construct
FRTVSGSAMRY

SEQ ID NO: 1491 - protein, 11 aa, synthetic construct
  REGION 1..11: note = Synthetic Construct
FRTTSGSSMRY

SEQ ID NO: 1492 - protein, 11 aa, synthetic construct
  REGION 1..11: note = Synthetic Construct
FRTVSGTSMRY

SEQ ID NO: 1493 - protein, 11 aa, synthetic construct
  REGION 1..11: note = Synthetic Construct
FRTRSGSSMRY

SEQ ID NO: 1494 - protein, 11 aa, synthetic construct
  REGION 1..11: note = Synthetic Construct
FRTSSGSSMRY

SEQ ID NO: 1495 - protein, 11 aa, synthetic construct
  REGION 1..11: note = Synthetic Construct
FRTVSGSSMSY

SEQ ID NO: 1496 - protein, 11 aa, synthetic construct
  REGION 1..11: note = Synthetic Construct
FRPVSGSSMRY

SEQ ID NO: 1497 - protein, 11 aa, synthetic construct
  REGION 1..11: note = Synthetic Construct
FRHVSGSSMRY

SEQ ID NO: 1498 - protein, 11 aa, synthetic construct
  REGION 1..11: note = Synthetic Construct
FRTKSGSSMRY

SEQ ID NO: 1499 - protein, 11 aa, synthetic construct
  REGION 1..11: note = Synthetic Construct
FTTVSGSSMRY

SEQ ID NO: 1500 - protein, 11 aa, synthetic construct
  REGION 1..11: note = Synthetic Construct
FHTVSGSSMRY

SEQ ID NO: 1501 - protein, 11 aa, synthetic construct
  REGION 1..11: note = Synthetic Construct
FRTVRGSSMRY

SEQ ID NO: 1502 - protein, 11 aa, synthetic construct
  REGION 1..11: note = Synthetic Construct
FRTVLGSSMRY

SEQ ID NO: 1503 - protein, 11 aa, synthetic construct
  REGION 1..11: note = Synthetic Construct
FRTVSGSSMRS

SEQ ID NO: 1504 - protein, 11 aa, synthetic construct
  REGION 1..11: note = Synthetic Construct
FRTVRGSSMRY

SEQ ID NO: 1505 - protein, 11 aa, synthetic construct
  REGION 1..11: note = Synthetic Construct
FRYVSGSSMRY

SEQ ID NO: 1506 - protein, 11 aa, synthetic construct
  REGION 1..11: note = Synthetic Construct
FRTVYGSSMRY

SEQ ID NO: 1507 - protein, 11 aa, synthetic construct
  REGION 1..11: note = Synthetic Construct
FRTVLGSSMRY

SEQ ID NO: 1508 - protein, 11 aa, synthetic construct
  REGION 1..11: note = Synthetic Construct
YRTVSGSSMRY

SEQ ID NO: 1509 - protein, 11 aa, synthetic construct
  REGION 1..11: note = Synthetic Construct
FRSVSGSSMRY

SEQ ID NO: 1510 - protein, 11 aa, synthetic construct
  REGION 1..11: note = Synthetic Construct
FRRVSGSSMRY

SEQ ID NO: 1511 - protein, 11 aa, synthetic construct
  REGION 1..11: note = Synthetic Construct
FRTVSGTSMRY

SEQ ID NO: 1512 - protein, 11 aa, synthetic construct
  REGION 1..11: note = Synthetic Construct
FRTVAGSSMRY

SEQ ID NO: 1513 - protein, 11 aa, synthetic construct
  REGION 1..11: note = Synthetic Construct
FRIVSGSSMRY

SEQ ID NO: 1514 - protein, 11 aa, synthetic construct
  REGION 1..11: note = Synthetic Construct
FRTVSGVSMRY

SEQ ID NO: 1515 - protein, 11 aa, synthetic construct
  REGION 1..11: note = Synthetic Construct
FRTVQGSSMRY

SEQ ID NO: 1516 - protein, 11 aa, synthetic construct
  REGION 1..11: note = Synthetic Construct
FRTASGSSMRY

SEQ ID NO: 1517 - protein, 11 aa, synthetic construct
  REGION 1..11: note = Synthetic Construct
FRTVSGSSSRY

SEQ ID NO: 1518 - protein, 11 aa, synthetic construct
  REGION 1..11: note = Synthetic Construct
FRTVQGSSMRY

SEQ ID NO: 1519 - protein, 11 aa, synthetic construct
  REGION 1..11: note = Synthetic Construct
FRTVRGSSMRY

SEQ ID NO: 1520 - protein, 11 aa, synthetic construct
  REGION 1..11: note = Synthetic Construct
FRTKSGSSMRY

SEQ ID NO: 1521 - protein, 11 aa, synthetic construct
  REGION 1..11: note = Synthetic Construct
FRTVWGSSMRY

SEQ ID NO: 1522 - protein, 11 aa, synthetic construct
  REGION 1..11: note = Synthetic Construct
FRTRSGSSMRY

SEQ ID NO: 1523 - protein, 11 aa, synthetic construct
  REGION 1..11: note = Synthetic Construct
FHTVCGTSMGY

SEQ ID NO: 1524 - protein, 11 aa, synthetic construct
  REGION 1..11: note = Synthetic Construct
FRTVSGSSQRY

SEQ ID NO: 1525 - protein, 11 aa, synthetic construct
  REGION 1..11: note = Synthetic Construct
FRTVSGSSMSY

SEQ ID NO: 1526 - protein, 11 aa, synthetic construct
  REGION 1..11: note = Synthetic Construct
FRTVRGSSMRY

SEQ ID NO: 1527 - protein, 11 aa, synthetic construct
  REGION 1..11: note = Synthetic Construct
FRTQSGSSMRY

SEQ ID NO: 1528 - protein, 11 aa, synthetic construct
  REGION 1..11: note = Synthetic Construct
FRTLSGSSMRY

SEQ ID NO: 1529 - protein, 11 aa, synthetic construct
  REGION 1..11: note = Synthetic Construct
FHTVSGSSMRY

SEQ ID NO: 1530 - protein, 11 aa, synthetic construct
  REGION 1..11: note = Synthetic Construct
FRRVSGSSMRY

SEQ ID NO: 1531 - protein, 11 aa, synthetic construct
  REGION 1..11: note = Synthetic Construct
FRLVSGSSMRY

SEQ ID NO: 1532 - protein, 11 aa, synthetic construct
  REGION 1..11: note = Synthetic Construct
FRTVSGSYMRY

SEQ ID NO: 1533 - protein, 11 aa, synthetic construct
  REGION 1..11: note = Synthetic Construct
FRTVGGSSMRY

SEQ ID NO: 1534 - protein, 11 aa, synthetic construct
  REGION 1..11: note = Synthetic Construct
FRTHSGSSMRY

SEQ ID NO: 1535 - protein, 11 aa, synthetic construct
  REGION 1..11: note = Synthetic Construct
FRTVSTSSMRY

SEQ ID NO: 1536 - protein, 11 aa, synthetic construct
  REGION 1..11: note = Synthetic Construct
FRTVLGTSMRY

SEQ ID NO: 1537 - protein, 11 aa, synthetic construct
  REGION 1..11: note = Synthetic Construct
FRTVSGSSMRY

SEQ ID NO: 1538 - protein, 11 aa, synthetic construct
  REGION 1..11: note = Synthetic Construct
FRTVSGSSMGY

SEQ ID NO: 1539 - protein, 11 aa, synthetic construct
  REGION 1..11: note = Synthetic Construct
FRTVSGSSMRA

SEQ ID NO: 1540 - protein, 11 aa, synthetic construct
  REGION 1..11: note = Synthetic Construct
FRILSGSSMRY

SEQ ID NO: 1541 - protein, 11 aa, synthetic construct
  REGION 1..11: note = Synthetic Construct
FRTVQGSSMRY

SEQ ID NO: 1542 - protein, 11 aa, synthetic construct
  REGION 1..11: note = Synthetic Construct
FRTVSGQSMGY

SEQ ID NO: 1543 - protein, 11 aa, synthetic construct
  REGION 1..11: note = Synthetic Construct
FRTVSGSSARY

SEQ ID NO: 1544 - protein, 11 aa, synthetic construct
  REGION 1..11: note = Synthetic Construct
FRYVSGSSMRY

SEQ ID NO: 1545 - protein, 11 aa, synthetic construct
  REGION 1..11: note = FRTVSGSSMRY
FRTVSGSSMRY

SEQ ID NO: 1546 - protein, 11 aa, synthetic construct
  REGION 1..11: note = Synthetic Construct
FRRVSGSSMRY

SEQ ID NO: 1547 - protein, 11 aa, synthetic construct
  REGION 1..11: note = Synthetic Construct
FHTVSGSSMRY

SEQ ID NO: 1548 - protein, 11 aa, synthetic construct
  REGION 1..11: note = Synthetic Construct
FRQVSGSSMRY

SEQ ID NO: 1549 - protein, 11 aa, synthetic construct
  REGION 1..11: note = Synthetic Construct
FRTVSGSYMRY

SEQ ID NO: 1550 - protein, 11 aa, synthetic construct
  REGION 1..11: note = Synthetic Construct
FRTASGSSMRY

SEQ ID NO: 1551 - protein, 11 aa, synthetic construct
  REGION 1..11: note = Synthetic Construct
FRTVSGHSMRY

SEQ ID NO: 1552 - protein, 11 aa, synthetic construct
  REGION 1..11: note = Synthetic Construct
FRTVSGSSSRY

SEQ ID NO: 1553 - protein, 11 aa, synthetic construct
  REGION 1..11: note = Synthetic Construct
FRTVSGSSYSY

SEQ ID NO: 1554 - protein, 11 aa, synthetic construct
  REGION 1..11: note = Synthetic Construct
FRTVSGSSQSY

SEQ ID NO: 1555 - protein, 9 aa, synthetic construct
  REGION 1..9: note = Synthetic Construct
YRWTRRYTY

SEQ ID NO: 1556 - protein, 9 aa, synthetic construct
  REGION 1..9: note = Synthetic Construct
YRWRTRYTY

SEQ ID NO: 1557 - protein, 9 aa, synthetic construct
  REGION 1..9: note = Synthetic Construct
YRWTTRRTY

SEQ ID NO: 1558 - protein, 9 aa, synthetic construct
  REGION 1..9: note = Synthetic Construct
YRWTTRYIY

SEQ ID NO: 1559 - protein, 9 aa, synthetic construct
  REGION 1..9: note = Synthetic Construct
YRWRTRYTY

SEQ ID NO: 1560 - protein, 9 aa, synthetic construct
  REGION 1..9: note = Synthetic Construct
YRWTRRYTY

SEQ ID NO: 1561 - protein, 9 aa, synthetic construct
  REGION 1..9: note = Synthetic Construct
YRWRTRYTY

SEQ ID NO: 1562 - protein, 9 aa, synthetic construct
  REGION 1..9: note = Synthetic Construct
YRWTTRYIY

SEQ ID NO: 1563 - protein, 9 aa, synthetic construct
  REGION 1..9: note = Synthetic Construct
YRWTTRRTY

SEQ ID NO: 1564 - protein, 9 aa, synthetic construct
  REGION 1..9: note = Synthetic Construct
YRWRTRYTY

SEQ ID NO: 1565 - protein, 9 aa, synthetic construct
  REGION 1..9: note = Synthetic Construct
YRWTTRYTY

SEQ ID NO: 1566 - protein, 9 aa, synthetic construct
  REGION 1..9: note = Synthetic Construct
YRWRTRYTY

SEQ ID NO: 1567 - protein, 9 aa, synthetic construct
  REGION 1..9: note = Synthetic Construct
YHWTTRYTY

SEQ ID NO: 1568 - protein, 9 aa, synthetic construct
  REGION 1..9: note = Synthetic Construct
YRWTTRRTY

SEQ ID NO: 1569 - protein, 9 aa, synthetic construct
  REGION 1..9: note = Synthetic Construct
YRWTTRYTY

SEQ ID NO: 1570 - protein, 9 aa, synthetic construct
  REGION 1..9: note = Synthetic Construct
YRWTTRYTY

SEQ ID NO: 1571 - protein, 9 aa, synthetic construct
  REGION 1..9: note = Synthetic Construct
YRWTTRYAY

SEQ ID NO: 1572 - protein, 9 aa, synthetic construct
  REGION 1..9: note = Synthetic Construct
YRWVTRYTY

SEQ ID NO: 1573 - protein, 9 aa, synthetic construct
  REGION 1..9: note = Synthetic Construct
YRWVTRYTY

SEQ ID NO: 1574 - protein, 9 aa, synthetic construct
  REGION 1..9: note = Synthetic Construct
YRWSTRYTY

SEQ ID NO: 1575 - protein, 9 aa, synthetic construct
  REGION 1..9: note = Synthetic Construct
YRWRTRYTY

SEQ ID NO: 1576 - protein, 9 aa, synthetic construct
  REGION 1..9: note = Synthetic Construct
YRWTTRGTY

SEQ ID NO: 1577 - protein, 9 aa, synthetic construct
  REGION 1..9: note = Synthetic Construct
YRWDTRYTY

SEQ ID NO: 1578 - protein, 9 aa, synthetic construct
  REGION 1..9: note = Synthetic Construct
YRWTTRRTY

SEQ ID NO: 1579 - protein, 9 aa, synthetic construct
  REGION 1..9: note = Synthetic Construct
YRWRTRYTY

SEQ ID NO: 1580 - protein, 9 aa, synthetic construct
  REGION 1..9: note = Synthetic Construct
YRWTGRYTY

SEQ ID NO: 1581 - protein, 9 aa, synthetic construct
  REGION 1..9: note = Synthetic Construct
YRWRTRYTY

SEQ ID NO: 1582 - protein, 9 aa, synthetic construct
  REGION 1..9: note = Synthetic Construct
YRWRTRYTY

SEQ ID NO: 1583 - protein, 9 aa, synthetic construct
  REGION 1..9: note = Synthetic Construct
YRWITRYTY

SEQ ID NO: 1584 - protein, 9 aa, synthetic construct
  REGION 1..9: note = Synthetic Construct
YRWITRYTY

SEQ ID NO: 1585 - protein, 9 aa, synthetic construct
  REGION 1..9: note = Synthetic Construct
YRWRTRYTY

SEQ ID NO: 1586 - protein, 9 aa, synthetic construct
  REGION 1..9: note = Synthetic Construct
YRWTRRYTY

SEQ ID NO: 1587 - protein, 9 aa, synthetic construct
  REGION 1..9: note = Synthetic Construct
YSWTTRYTY

SEQ ID NO: 1588 - protein, 9 aa, synthetic construct
  REGION 1..9: note = Synthetic Construct
YRWTNRYTY

SEQ ID NO: 1589 - protein, 9 aa, synthetic construct
  REGION 1..9: note = Synthetic Construct
YRWTTRYRY

SEQ ID NO: 1590 - protein, 9 aa, synthetic construct
  REGION 1..9: note = Synthetic Construct
YRWTTRYTY

SEQ ID NO: 1591 - protein, 9 aa, synthetic construct
  REGION 1..9: note = Synthetic Construct
YRWTTRYKY

SEQ ID NO: 1592 - protein, 9 aa, synthetic construct
  REGION 1..9: note = Synthetic Construct
YRWHTRYTY

SEQ ID NO: 1593 - protein, 9 aa, synthetic construct
  REGION 1..9: note = Synthetic Construct
YRWTRRYTY

SEQ ID NO: 1594 - protein, 9 aa, synthetic construct
  REGION 1..9: note = Synthetic Construct
YRWMTRYTY

SEQ ID NO: 1595 - protein, 9 aa, synthetic construct
  REGION 1..9: note = Synthetic Construct
YRWTTRYRY

SEQ ID NO: 1596 - protein, 9 aa, synthetic construct
  REGION 1..9: note = Synthetic Construct
YRWSTRYTY

SEQ ID NO: 1597 - protein, 9 aa, synthetic construct
  REGION 1..9: note = Synthetic Construct
YRWTTRYTF

SEQ ID NO: 1598 - protein, 9 aa, synthetic construct
  REGION 1..9: note = Synthetic Construct
YRWRTRYTY

SEQ ID NO: 1599 - protein, 9 aa, synthetic construct
  REGION 1..9: note = Synthetic Construct
YRWTTRRTY

SEQ ID NO: 1600 - protein, 9 aa, synthetic construct
  REGION 1..9: note = Synthetic Construct
YRWATRYTY

SEQ ID NO: 1601 - protein, 9 aa, synthetic construct
  REGION 1..9: note = Synthetic Construct
YRWHTRYTY

SEQ ID NO: 1602 - protein, 9 aa, synthetic construct
  REGION 1..9: note = Synthetic Construct
YRWGTRYTY

SEQ ID NO: 1603 - protein, 9 aa, synthetic construct
  REGION 1..9: note = Synthetic Construct
YRWTTRNTY

SEQ ID NO: 1604 - protein, 9 aa, synthetic construct
  REGION 1..9: note = Synthetic Construct
YRWRTRYTY

SEQ ID NO: 1605 - protein, 9 aa, synthetic construct
  REGION 1..9: note = Synthetic Construct
YRWTTRYAY

SEQ ID NO: 1606 - protein, 9 aa, synthetic construct
  REGION 1..9: note = Synthetic Construct
YRWRTRYTY

SEQ ID NO: 1607 - protein, 9 aa, synthetic construct
  REGION 1..9: note = Synthetic Construct
YRWTTRRTY

SEQ ID NO: 1608 - protein, 9 aa, synthetic construct
  REGION 1..9: note = Synthetic Construct
YRWTTRRTY

SEQ ID NO: 1609 - protein, 9 aa, synthetic construct
  REGION 1..9: note = Synthetic Construct
YRWTSRYTY

SEQ ID NO: 1610 - protein, 9 aa, synthetic construct
  REGION 1..9: note = Synthetic Construct
YRWTTRVTY

SEQ ID NO: 1611 - protein, 9 aa, synthetic construct
  REGION 1..9: note = Synthetic Construct
YRWTTRTTY

SEQ ID NO: 1612 - protein, 9 aa, synthetic construct
  REGION 1..9: note = Synthetic Construct
YRWRTRYTY

SEQ ID NO: 1613 - protein, 9 aa, synthetic construct
  REGION 1..9: note = Synthetic Construct
YRWATRYTY

SEQ ID NO: 1614 - protein, 9 aa, synthetic construct
  REGION 1..9: note = Synthetic Construct
YRWTTRRTY

SEQ ID NO: 1615 - protein, 9 aa, synthetic construct
  REGION 1..9: note = Synthetic Construct
LRWTTRYTY

SEQ ID NO: 1616 - protein, 9 aa, synthetic construct
  REGION 1..9: note = Synthetic Construct
YRWTTRGTY

SEQ ID NO: 1617 - protein, 9 aa, synthetic construct
  REGION 1..9: note = Synthetic Construct
YRWRTRYTY

SEQ ID NO: 1618 - protein, 9 aa, synthetic construct
  REGION 1..9: note = Synthetic Construct
YRWTTRATY

SEQ ID NO: 1619 - protein, 9 aa, synthetic construct
  REGION 1..9: note = Synthetic Construct
YRWTTRRTY

SEQ ID NO: 1620 - protein, 9 aa, synthetic construct
  REGION 1..9: note = Synthetic Construct
YRWPTRYTY

SEQ ID NO: 1621 - protein, 9 aa, synthetic construct
  REGION 1..9: note = Synthetic Construct
YRWRTRYTY

SEQ ID NO: 1622 - protein, 9 aa, synthetic construct
  REGION 1..9: note = Synthetic Construct
YRWKTRYTY

SEQ ID NO: 1623 - protein, 9 aa, synthetic construct
  REGION 1..9: note = Synthetic Construct
YRWSTRYTY

SEQ ID NO: 1624 - protein, 9 aa, synthetic construct
  REGION 1..9: note = Synthetic Construct
YRWKTRRTY

SEQ ID NO: 1625 - protein, 9 aa, synthetic construct
  REGION 1..9: note = Synthetic Construct
YRWTTRRTY

SEQ ID NO: 1626 - protein, 9 aa, synthetic construct
  REGION 1..9: note = Synthetic Construct
YRWTTRYRY

SEQ ID NO: 1627 - protein, 9 aa, synthetic construct
  REGION 1..9: note = Synthetic Construct
YRWRTRYTY

SEQ ID NO: 1628 - protein, 9 aa, synthetic construct
  REGION 1..9: note = Synthetic Construct
YRWTTRYKY

SEQ ID NO: 1629 - protein, 9 aa, synthetic construct
  REGION 1..9: note = Synthetic Construct
YRWKTRYTY

SEQ ID NO: 1630 - protein, 9 aa, synthetic construct
  REGION 1..9: note = Synthetic Construct
YRWTTRVTY

SEQ ID NO: 1631 - protein, 9 aa, synthetic construct
  REGION 1..9: note = Synthetic Construct
YRWTTRFTY

SEQ ID NO: 1632 - protein, 9 aa, synthetic construct
  REGION 1..9: note = Synthetic Construct
YRWTTRFTY

SEQ ID NO: 1633 - protein, 9 aa, synthetic construct
  REGION 1..9: note = Synthetic Construct
YRWRTRYTY

SEQ ID NO: 1634 - protein, 9 aa, synthetic construct
  REGION 1..9: note = Synthetic Construct
YRWTTRYTH

SEQ ID NO: 1635 - protein, 9 aa, synthetic construct
  REGION 1..9: note = Synthetic Construct
YRWTRRYTY

SEQ ID NO: 1636 - protein, 9 aa, synthetic construct
  REGION 1..9: note = Synthetic Construct
YRWTTRYTY

SEQ ID NO: 1637 - protein, 9 aa, synthetic construct
  REGION 1..9: note = Synthetic Construct
YRWTTRSTY

SEQ ID NO: 1638 - protein, 9 aa, synthetic construct
  REGION 1..9: note = Synthetic Construct
YSWTTRYTY

SEQ ID NO: 1639 - protein, 9 aa, synthetic construct
  REGION 1..9: note = Synthetic Construct
YRWTTRGTY

SEQ ID NO: 1640 - protein, 9 aa, synthetic construct
  REGION 1..9: note = Synthetic Construct
YRWKTRYTY

SEQ ID NO: 1641 - protein, 9 aa, synthetic construct
  REGION 1..9: note = Synthetic Construct
YRWTTRFTY

SEQ ID NO: 1642 - protein, 9 aa, synthetic construct
  REGION 1..9: note = Synthetic Construct
YRWRTRYTY

SEQ ID NO: 1643 - protein, 9 aa, synthetic construct
  REGION 1..9: note = Synthetic Construct
YRWTTRRTY

SEQ ID NO: 1644 - protein, 9 aa, synthetic construct
  REGION 1..9: note = Synthetic Construct
YRWSTRYTY

SEQ ID NO: 1645 - protein, 9 aa, synthetic construct
  REGION 1..9: note = Synthetic Construct
YRWTTRLTY

SEQ ID NO: 1646 - protein, 9 aa, synthetic construct
  REGION 1..9: note = Synthetic Construct
YRWTRRYTY

SEQ ID NO: 1647 - protein, 9 aa, synthetic construct
  REGION 1..9: note = Synthetic Construct
YRWTTRLTY

SEQ ID NO: 1648 - protein, 9 aa, synthetic construct
  REGION 1..9: note = Synthetic Construct
YRWTRRYTY

SEQ ID NO: 1649 - protein, 9 aa, synthetic construct
  REGION 1..9: note = Synthetic Construct
YRWTTRRTY

SEQ ID NO: 1650 - protein, 9 aa, synthetic construct
  REGION 1..9: note = Synthetic Construct
YQWTTRYTY

SEQ ID NO: 1651 - protein, 9 aa, synthetic construct
  REGION 1..9: note = Synthetic Construct
YRWTRRYTY

SEQ ID NO: 1652 - protein, 9 aa, synthetic construct
  REGION 1..9: note = Synthetic Construct
YRWTTRMTY

SEQ ID NO: 1653 - protein, 9 aa, synthetic construct
  REGION 1..9: note = Synthetic Construct
YRWTTRRTY

SEQ ID NO: 1654 - protein, 9 aa, synthetic construct
  REGION 1..9: note = Synthetic Construct
YRWTTRYRY

SEQ ID NO: 1655 - protein, 9 aa, synthetic construct
  REGION 1..9: note = Synthetic Construct
YRWLTRYTY

SEQ ID NO: 1656 - protein, 9 aa, synthetic construct
  REGION 1..9: note = Synthetic Construct
YEWTTRYTY

SEQ ID NO: 1657 - protein, 9 aa, synthetic construct
  REGION 1..9: note = Synthetic Construct
YRWRTRYTY

SEQ ID NO: 1658 - protein, 9 aa, synthetic construct
  REGION 1..9: note = Synthetic Construct
YRWRTRYTY

SEQ ID NO: 1659 - protein, 9 aa, synthetic construct
  REGION 1..9: note = Synthetic Construct
YRWRTRYTY

SEQ ID NO: 1660 - protein, 9 aa, synthetic construct
  REGION 1..9: note = Synthetic Construct
YRWSTRYTY

SEQ ID NO: 1661 - protein, 9 aa, synthetic construct
  REGION 1..9: note = Synthetic Construct
YRWTTRLTY

SEQ ID NO: 1662 - protein, 9 aa, synthetic construct
  REGION 1..9: note = Synthetic Construct
YRWTTRLTY

SEQ ID NO: 1663 - protein, 9 aa, synthetic construct
  REGION 1..9: note = Synthetic Construct
YKWTTRYTY

SEQ ID NO: 1664 - protein, 9 aa, synthetic construct
  REGION 1..9: note = Synthetic Construct
YRWTTRSTY

SEQ ID NO: 1665 - protein, 9 aa, synthetic construct
  REGION 1..9: note = Synthetic Construct
YRWRTRYTY

SEQ ID NO: 1666 - protein, 9 aa, synthetic construct
  REGION 1..9: note = Synthetic Construct
YRWSTRYTY

SEQ ID NO: 1667 - protein, 9 aa, synthetic construct
  REGION 1..9: note = Synthetic Construct
YRWTTRYTY

SEQ ID NO: 1668 - protein, 9 aa, synthetic construct
  REGION 1..9: note = Synthetic Construct
YRWRTRYTY

SEQ ID NO: 1669 - protein, 9 aa, synthetic construct
  REGION 1..9: note = Synthetic Construct
YRWLTRYTY

SEQ ID NO: 1670 - protein, 9 aa, synthetic construct
  REGION 1..9: note = Synthetic Construct
YRWRTRYTY

SEQ ID NO: 1671 - protein, 9 aa, synthetic construct
  REGION 1..9: note = Synthetic Construct
YRWTTRYTY

SEQ ID NO: 1672 - protein, 9 aa, synthetic construct
  REGION 1..9: note = Synthetic Construct
YRWTTRYRY

SEQ ID NO: 1673 - protein, 9 aa, synthetic construct
  REGION 1..9: note = Synthetic Construct
YRWTTRYTY

SEQ ID NO: 1674 - protein, 9 aa, synthetic construct
  REGION 1..9: note = Synthetic Construct
YRWPTRYTY

SEQ ID NO: 1675 - protein, 9 aa, synthetic construct
  REGION 1..9: note = Synthetic Construct
YRWTTRHTY

SEQ ID NO: 1676 - protein, 9 aa, synthetic construct
  REGION 1..9: note = Synthetic Construct
YRWTRRYTY

SEQ ID NO: 1677 - protein, 9 aa, synthetic construct
  REGION 1..9: note = Synthetic Construct
YRWHTRYTY

SEQ ID NO: 1678 - protein, 9 aa, synthetic construct
  REGION 1..9: note = Synthetic Construct
YRWTNRYTY

SEQ ID NO: 1679 - protein, 9 aa, synthetic construct
  REGION 1..9: note = Synthetic Construct
YRWTTRYRY

SEQ ID NO: 1680 - protein, 9 aa, synthetic construct
  REGION 1..9: note = Synthetic Construct
YRWTTRRTY

SEQ ID NO: 1681 - protein, 9 aa, synthetic construct
  REGION 1..9: note = Synthetic Construct
YRWSTRYTY

SEQ ID NO: 1682 - protein, 9 aa, synthetic construct
  REGION 1..9: note = Synthetic Construct
YRWSTRYTY

SEQ ID NO: 1683 - protein, 9 aa, synthetic construct
  REGION 1..9: note = Synthetic Construct
YRWRTRYTY

SEQ ID NO: 1684 - protein, 9 aa, synthetic construct
  REGION 1..9: note = Synthetic Construct
YRWTTRYTY

SEQ ID NO: 1685 - protein, 9 aa, synthetic construct
  REGION 1..9: note = Synthetic Construct
YEWTTRYTY

SEQ ID NO: 1686 - protein, 9 aa, synthetic construct
  REGION 1..9: note = Synthetic Construct
YRWTTRSTY

SEQ ID NO: 1687 - protein, 9 aa, synthetic construct
  REGION 1..9: note = Synthetic Construct
YRWTTRYTY

SEQ ID NO: 1688 - protein, 9 aa, synthetic construct
  REGION 1..9: note = Synthetic Construct
YRWSTRYTY

SEQ ID NO: 1689 - protein, 9 aa, synthetic construct
  REGION 1..9: note = Synthetic Construct
YRWSTRYTY

SEQ ID NO: 1690 - protein, 9 aa, synthetic construct
  REGION 1..9: note = Synthetic Construct
YRWTYRYTY

SEQ ID NO: 1691 - protein, 9 aa, synthetic construct
  REGION 1..9: note = Synthetic Construct
YRWTTRLTY

SEQ ID NO: 1692 - protein, 9 aa, synthetic construct
  REGION 1..9: note = Synthetic Construct
YEWTTRYTY

SEQ ID NO: 1693 - protein, 9 aa, synthetic construct
  REGION 1..9: note = Synthetic Construct
YRWTTRLTY

SEQ ID NO: 1694 - protein, 11 aa, synthetic construct
  REGION 1..11: note = Synthetic Construct
FRPAAGSPMRY

SEQ ID NO: 1695 - protein, 11 aa, synthetic construct
  REGION 1..11: note = Synthetic Construct
FRTVDGSPLRY

SEQ ID NO: 1696 - protein, 11 aa, synthetic construct
  REGION 1..11: note = Synthetic Construct
FRTVSGSSKRY

SEQ ID NO: 1697 - protein, 11 aa, synthetic construct
  REGION 1..11: note = Synthetic Construct
FSAGSGTEMSY

SEQ ID NO: 1698 - protein, 11 aa, synthetic construct
  REGION 1..11: note = Synthetic Construct
FGSLSGSSTTY

SEQ ID NO: 1699 - protein, 11 aa, synthetic construct
  REGION 1..11: note = Synthetic Construct
FGSVSGSWTRY

SEQ ID NO: 1700 - protein, 11 aa, synthetic construct
  REGION 1..11: note = Synthetic Construct
FRLVSGSSMSY

SEQ ID NO: 1701 - protein, 11 aa, synthetic construct
  REGION 1..11: note = Synthetic Construct
FRTGSGTSKSY

SEQ ID NO: 1702 - protein, 11 aa, synthetic construct
  REGION 1..11: note = Synthetic Construct
FSNMSGTTRRY

SEQ ID NO: 1703 - protein, 11 aa, synthetic construct
  REGION 1..11: note = Synthetic Construct
FRTVPGSAMGY

SEQ ID NO: 1704 - protein, 11 aa, synthetic construct
  REGION 1..11: note = Synthetic Construct
FRAESGSSMGY

SEQ ID NO: 1705 - protein, 11 aa, synthetic construct
  REGION 1..11: note = Synthetic Construct
FRTLYGSSRSY

SEQ ID NO: 1706 - protein, 11 aa, synthetic construct
  REGION 1..11: note = Synthetic Construct
FSPFSGSDTGY

SEQ ID NO: 1707 - protein, 11 aa, synthetic construct
  REGION 1..11: note = Synthetic Construct
FSTFSGSSISY

SEQ ID NO: 1708 - protein, 11 aa, synthetic construct
  REGION 1..11: note = Synthetic Construct
FRTLAGSEMRY

SEQ ID NO: 1709 - protein, 11 aa, synthetic construct
  REGION 1..11: note = Synthetic Construct
FRTVSGSGVRY

SEQ ID NO: 1710 - protein, 11 aa, synthetic construct
  REGION 1..11: note = Synthetic Construct
FRPGAGHSNSY

SEQ ID NO: 1711 - protein, 11 aa, synthetic construct
  REGION 1..11: note = Synthetic Construct
FRRASGTAMSY

SEQ ID NO: 1712 - protein, 11 aa, synthetic construct
  REGION 1..11: note = Synthetic Construct
FTSASGTDLSY

SEQ ID NO: 1713 - protein, 11 aa, synthetic construct
  REGION 1..11: note = Synthetic Construct
FRSANGSSKRY

SEQ ID NO: 1714 - protein, 11 aa, synthetic construct
  REGION 1..11: note = Synthetic Construct
FKTIAGAGMRY

SEQ ID NO: 1715 - protein, 11 aa, synthetic construct
  REGION 1..11: note = Synthetic Construct
FRYGSGSSLSY

SEQ ID NO: 1716 - protein, 11 aa, synthetic construct
  REGION 1..11: note = Synthetic Construct
FRTVPGASMKY

SEQ ID NO: 1717 - protein, 11 aa, synthetic construct
  REGION 1..11: note = Synthetic Construct
FRTVDGSAISY

SEQ ID NO: 1718 - protein, 11 aa, synthetic construct
  REGION 1..11: note = Synthetic Construct
FRTVKGSGGSY

SEQ ID NO: 1719 - protein, 11 aa, synthetic construct
  REGION 1..11: note = Synthetic Construct
FRTVSGSSRGY

SEQ ID NO: 1720 - protein, 11 aa, synthetic construct
  REGION 1..11: note = Synthetic Construct
FRPGPGSQMAY

SEQ ID NO: 1721 - protein, 11 aa, synthetic construct
  REGION 1..11: note = Synthetic Construct
FRTVAGSASGY

SEQ ID NO: 1722 - protein, 11 aa, synthetic construct
  REGION 1..11: note = Synthetic Construct
FRTVSGSSYSY

SEQ ID NO: 1723 - protein, 11 aa, synthetic construct
  REGION 1..11: note = Synthetic Construct
FINLKGSSMAY

SEQ ID NO: 1724 - protein, 11 aa, synthetic construct
  REGION 1..11: note = Synthetic Construct
FRMVTGSYGGY

SEQ ID NO: 1725 - protein, 11 aa, synthetic construct
  REGION 1..11: note = Synthetic Construct
FKSSYGLPMRY

SEQ ID NO: 1726 - protein, 11 aa, synthetic construct
  REGION 1..11: note = Synthetic Construct
FKTVSGQSLRY

SEQ ID NO: 1727 - protein, 11 aa, synthetic construct
  REGION 1..11: note = Synthetic Construct
FRTVTGRAARY

SEQ ID NO: 1728 - protein, 11 aa, synthetic construct
  REGION 1..11: note = Synthetic Construct
FGPAIGASRTY

SEQ ID NO: 1729 - protein, 11 aa, synthetic construct
  REGION 1..11: note = Synthetic Construct
FRTVSGAPKSY

SEQ ID NO: 1730 - protein, 11 aa, synthetic construct
  REGION 1..11: note = Synthetic Construct
FHTVSGSSMSY

SEQ ID NO: 1731 - protein, 11 aa, synthetic construct
  REGION 1..11: note = Synthetic Construct
FRRLEGYSNRY

SEQ ID NO: 1732 - protein, 11 aa, synthetic construct
  REGION 1..11: note = Synthetic Construct
FRTGSGSSMGY

SEQ ID NO: 1733 - protein, 11 aa, synthetic construct
  REGION 1..11: note = Synthetic Construct
FTTVTGSSMSY

SEQ ID NO: 1734 - protein, 9 aa, synthetic construct
  REGION 1..9: note = Synthetic Construct
YYWTERRPY

SEQ ID NO: 1735 - protein, 9 aa, synthetic construct
  REGION 1..9: note = Synthetic Construct
YSWDDAHPY

SEQ ID NO: 1736 - protein, 9 aa, synthetic construct
  REGION 1..9: note = Synthetic Construct
YRWMTRLTY

SEQ ID NO: 1737 - protein, 9 aa, synthetic construct
  REGION 1..9: note = Synthetic Construct
YDWADAQPY

SEQ ID NO: 1738 - protein, 9 aa, synthetic construct
  REGION 1..9: note = Synthetic Construct
YSWTDRLPY

SEQ ID NO: 1739 - protein, 9 aa, synthetic construct
  REGION 1..9: note = Synthetic Construct
YRWATRLPY

SEQ ID NO: 1740 - protein, 9 aa, synthetic construct
  REGION 1..9: note = Synthetic Construct
YKWSNRLPY

SEQ ID NO: 1741 - protein, 9 aa, synthetic construct
  REGION 1..9: note = Synthetic Construct
YGWKTRQPY

SEQ ID NO: 1742 - protein, 9 aa, synthetic construct
  REGION 1..9: note = Synthetic Construct
YRWPNRRGY

SEQ ID NO: 1743 - protein, 9 aa, synthetic construct
  REGION 1..9: note = Synthetic Construct
YDWTTRQRY

SEQ ID NO: 1744 - protein, 9 aa, synthetic construct
  REGION 1..9: note = Synthetic Construct
YNWSYAQPY

SEQ ID NO: 1745 - protein, 9 aa, synthetic construct
  REGION 1..9: note = Synthetic Construct
YNWTDSLQY

SEQ ID NO: 1746 - protein, 9 aa, synthetic construct
  REGION 1..9: note = Synthetic Construct
YSWTTSLPY

SEQ ID NO: 1747 - protein, 9 aa, synthetic construct
  REGION 1..9: note = Synthetic Construct
YKWRSRSTY

SEQ ID NO: 1748 - protein, 9 aa, synthetic construct
  REGION 1..9: note = Synthetic Construct
YSQTTRDPY

SEQ ID NO: 1749 - protein, 9 aa, synthetic construct
  REGION 1..9: note = Synthetic Construct
YRWTARDTY

SEQ ID NO: 1750 - protein, 9 aa, synthetic construct
  REGION 1..9: note = Synthetic Construct
YRWTSRLSY

SEQ ID NO: 1751 - protein, 9 aa, synthetic construct
  REGION 1..9: note = Synthetic Construct
YSWTTRSRY

SEQ ID NO: 1752 - protein, 9 aa, synthetic construct
  REGION 1..9: note = Synthetic Construct
YNWTSRYRY

SEQ ID NO: 1753 - protein, 9 aa, synthetic construct
  REGION 1..9: note = Synthetic Construct
YSWKTRFPY

SEQ ID NO: 1754 - protein, 9 aa, synthetic construct
  REGION 1..9: note = Synthetic Construct
YSWTTRYPY

SEQ ID NO: 1755 - protein, 9 aa, synthetic construct
  REGION 1..9: note = Synthetic Construct
YEWTNALPY

SEQ ID NO: 1756 - protein, 9 aa, synthetic construct
  REGION 1..9: note = Synthetic Construct
YSWITRSPY

SEQ ID NO: 1757 - protein, 9 aa, synthetic construct
  REGION 1..9: note = Synthetic Construct
YSWTTRRQY

SEQ ID NO: 1758 - protein, 9 aa, synthetic construct
  REGION 1..9: note = Synthetic Construct
YSWITRSPY

SEQ ID NO: 1759 - protein, 9 aa, synthetic construct
  REGION 1..9: note = Synthetic Construct
YRWEESRQY

SEQ ID NO: 1760 - protein, 9 aa, synthetic construct
  REGION 1..9: note = Synthetic Construct
YTWTTRLPY

SEQ ID NO: 1761 - protein, 9 aa, synthetic construct
  REGION 1..9: note = Synthetic Construct
YRWEESRQY

SEQ ID NO: 1762 - protein, 9 aa, synthetic construct
  REGION 1..9: note = Synthetic Construct
YSWTTRQPY

SEQ ID NO: 1763 - protein, 9 aa, synthetic construct
  REGION 1..9: note = Synthetic Construct
YVWGTRLPY

SEQ ID NO: 1764 - protein, 9 aa, synthetic construct
  REGION 1..9: note = Synthetic Construct
YEWTNALPY

SEQ ID NO: 1765 - protein, 9 aa, synthetic construct
  REGION 1..9: note = Synthetic Construct
YRWEDALTY

SEQ ID NO: 1766 - protein, 9 aa, synthetic construct
  REGION 1..9: note = Synthetic Construct
YSWTTRYPY

SEQ ID NO: 1767 - protein, 9 aa, synthetic construct
  REGION 1..9: note = Synthetic Construct
YSWIDSLRY

SEQ ID NO: 1768 - protein, 9 aa, synthetic construct
  REGION 1..9: note = Synthetic Construct
YSWTTPRAY

SEQ ID NO: 1769 - protein, 115 aa, synthetic construct
  REGION 1..115: note = Synthetic Construct
EVQLVESGGGLVQPGNSLRLSCAASGFTFSRFGMSWVRQAPGKGLEWVSSISGSGSDTLYADSVKGRFTISRDNAKTTLYLQMNSLRPEDTAVYYCTIGGSLSRSSQGTLVTVSS

SEQ ID NO: 1770 - protein, 115 aa, synthetic construct
  REGION 1..115: note = Synthetic Construct
EVQLVESGGGLVQPGNSLRLSCAASGFTFSKFGMSWVRQAPGKGLEWVSSISGSGADTLYADSLKGRFTISRDNAKTTLYLQMNSLRPEDTAVYYCTIGGSLSKSSQGTLVTVSS

SEQ ID NO: 1771 - protein, 115 aa, synthetic construct
  REGION 1..115: note = Synthetic Construct
EVQLVESGGGLVQPGNSLRLSCAASGFTYSSFGMSWVRQAPGKGLEWVSSISGSGSDTLYADSVKGRFTISRDNAKTTLYLQMNSLRPEDTAVYYCTIGGSLSKSSQGTLVTVSS

SEQ ID NO: 1772 - protein, 115 aa, synthetic construct
  REGION 1..115: note = Synthetic Construct
EVQLVESGGGLVQPGNSLRLSCAASGFTFSKFGMSWVRQAPGKGLEWVSSISGSGTDTLYADSVKGRFTISRDNAKTTLYLQMNSLRPEDTAVYYCTIGGSLSRSSQGTLVTVSS

SEQ ID NO: 1773 - protein, 115 aa, synthetic construct
  REGION 1..115: note = Synthetic Construct
EVQLVESGGGLVQPGNSLRLSCAASGFTFSRFGMSWVRQAPGKGLEWVSSISGSGSDTLYADSVKGRFTISRDNAKTTLYLQMNSLRPEDTAVYYCTIGGSLSKSSQGTLVTVSS

SEQ ID NO: 1774 - protein, 115 aa, synthetic construct
  REGION 1..115: note = Synthetic Construct
EVQLVESGGGLVQPGNSLRLSCAASGFTFSKFGMSWVRQAPGKGLEWVSSISGSGRDTLYADSVKGRFTISRDNAKTTLYLQMNSLRPEDTAVYYCTIGGSLSVSSQGTLVTVSS

SEQ ID NO: 1775 - protein, 115 aa, synthetic construct [sequence omitted]

SEQ ID NO: 1776 - protein, 115 aa, synthetic construct
  REGION 1..115: note = Synthetic Construct
EVQLVESGGGLVQPGNSLRLSCAASGFTFSRFGMSWVRQAPGKGLEWVSSISGSGSDTLYAESVKGRFTISRDNAKTTLYLQMNSLRPEDTAVYYCTIGGSLSRSSQGTLVTVSS

SEQ ID NO: 1777 - protein, 115 aa, synthetic construct
  REGION 1..115: note = Synthetic Construct
EVQLVESGGGLVQPGNSLRLSCAASGFTFSKFGMSWVRQAPGKGLEWVSSISGSGTDTLYAESVKGRFTISRDNAKTTLYLQMNSLRPEDTAVYYCTIGGSLSRSSQGTLVTVSS

SEQ ID NO: 1778 - protein, 115 aa, synthetic construct
  REGION 1..115: note = Synthetic Construct
EVQLVESGGGLVQPGNSLRLSCAASGFTFSKFGMSWVRQAPGKGLEWVSSISGSGRDTLYAESVKGRFTISRDNAKTTLYLQMNSLRPEDTAVYYCTIGGSLSVSSQGTLVTVSS

SEQ ID NO: 1779 - protein, 10 aa, synthetic construct
  REGION 1..10: note = Synthetic Construct
GFTFSSFGMS

SEQ ID NO: 1780 - protein, 16 aa, synthetic construct
  REGION 1..16: note = Synthetic Construct
SISGSGSDTLYADSVK

SEQ ID NO: 1781 - protein, 6 aa, synthetic construct
  REGION 1..6: note = Synthetic Construct
GGSLSR

SEQ ID NO: 1782 - protein, 10 aa, synthetic construct
  REGION 1..10: note = Synthetic Construct
GFTFSRFGMS

SEQ ID NO: 1783 - protein, 10 aa, synthetic construct
  REGION 1..10: note = Synthetic Construct
GFTFSKFGMS

SEQ ID NO: 1784 - protein, 10 aa, synthetic construct
  REGION 1..10: note = Synthetic Construct
GFTYSSFGMS

SEQ ID NO: 1785 - protein, 16 aa, synthetic construct
  REGION 1..16: note = Synthetic Construct
SISGSGADTLYADSLK

SEQ ID NO: 1786 - protein, 16 aa, synthetic construct
  REGION 1..16: note = Synthetic Construct
SISGSGTDTLYADSVK

SEQ ID NO: 1787 - protein, 16 aa, synthetic construct
  REGION 1..16: note = Synthetic Construct
SISGSGRDTLYADSVK

SEQ ID NO: 1788 - protein, 16 aa, synthetic construct
  REGION 1..16: note = Synthetic Construct
SISGSGSDTLYAESVK

SEQ ID NO: 1789 - protein, 16 aa, synthetic construct
  REGION 1..16: note = Synthetic Construct
SISGSGTDTLYAESVK

SEQ ID NO: 1790 - protein, 16 aa, synthetic construct
  REGION 1..16: note = Synthetic Construct
SISGSGRDTLYAESVK

SEQ ID NO: 1791 - protein, 6 aa, synthetic construct
  REGION 1..6: note = Synthetic Construct
GGSLSK

SEQ ID NO: 1792 - protein, 6 aa, synthetic construct
  REGION 1..6: note = Synthetic Construct
GGSLSV

SEQ ID NO: 1793 - protein, 249 aa, synthetic construct
  REGION 1..249: note = Synthetic Construct
EVQLVESGGGLVQPGGSLKLSCAASGFTFNKYAINWVRQAPGKGLEWVARIRSKYNNYATYYADQVKDRFTISRDDSKNTAYLQMNNLKTEDTAVYYCVRHANFGNSYISYWAYWGQGTLVTVSSGGGGSGGGGSGGGGSQTVVTQEPSLTVSPGGTVTLTCASSTGAVTSGNYPNWVQQKPGQAPRGLIGGTKFLVPGTPARFSGSLLGGKAALTLSGVQPEDEAEYYCTLWYSNRWVFGGGTKLTVL

SEQ ID NO: 1794 - protein, 249 aa, synthetic construct
  REGION 1..249: note = Synthetic Construct
EVQLVESGGGLVQPGGSLKLSCAASGFEFNKYAMNWVRQAPGKGLEWVARIRSKYNKYATYYADSVKDRFTISRDDSKNTAYLQMNNLKTEDTAVYYCVRHGNFGNSYISYWAYWGQGTLVTVSSGGGGSGGGGSGGGGSQTVVTQEPSLTVSPGGTVTLTCGSSFGAVTSGNYPNWVQQKPGQAPRGLIGGTKFLAPGTPARFSGSLLGGKAALTLSGVQPEDEAEYYCVLWYDNRWVFGGGTKLTVL

SEQ ID NO: 1795 - protein, 249 aa, synthetic construct
  REGION 1..249: note = Synthetic Construct
EVQLVESGGGLVQPGGSLKLSCAASGFTFNKYAMNWVRQAPGKGLEWVARIRSKYNNYATYYADSVKDRFTISRDDSKNTAYLQMNNLKTEDTAVYYCVRHGNFGNSHISYWAYWGQGTLVTVSSGGGGSGGGGSGGGGSQTVVTQEPSLTVSPGGTVTLTCGSSTGYVTSGNYPNWVQQKPGQAPRGLIGGTSFLAPGTPARFSGSLLGGKAALTLSGVQPEDEAEYYCVLWYSNRWIFGGGTKLTVL

SEQ ID NO: 1796 - protein, 249 aa, synthetic construct
  REGION 1..249: note = Synthetic Construct
EVQLVESGGGLVQPGGSLKLSCAASGFMFNKYAMNWVRQAPGKGLEWVARIRSKSNNYATYYADSVKDRFTISRDDSKNTAYLQMNNLKTEDTAVYYCVRHGNFGNSYISYWATWGQGTLVTVSSGGGGSGGGGSGGGGSQTVVTQEPSLTVSPGGTVTLTCGSSFGAVTSGNYPNWVQQKPGQAPRGLIGGTKLLAPGTPARFSGSLLGGKAALTLSGVQPEDEAEYYCVLWYSNSWVFGGGTKLTVL

SEQ ID NO: 1797 - protein, 249 aa, synthetic construct
  REGION 1..249: note = Synthetic Construct
EVQLVESGGGLVQPGGSLKLSCAASGFTFNTYAMNWVRQAPGKGLEWVARIRSKYNNYATYYKDSVKDRFTISRDDSKNTAYLQMNNLKTEDTAVYYCVRHGNFGNSPISYWAYWGQGTLVTVSSGGGGSGGGGSGGGGSQTVVTQEPSLTVSPGGTVTLTCGSSTGAVVSGNYPNWVQQKPGQAPRGLIGGTEFLAPGTPARFSGSLLGGKAALTLSGVQPEDEAEYYCVLWYSNRWVFGGGTKLTVL

SEQ ID NO: 1798 - protein, 249 aa, synthetic construct
  REGION 1..249: note = Synthetic Construct
EVQLVESGGGLVQPGGSLKLSCAASGFTYNKYAMNWVRQAPGKGLEWVARIRSKYNNYATYYADEVKDRFTISRDDSKNTAYLQMNNLKTEDTAVYYCVRHGNFGNSPISYWAYWGQGTLVTVSSGGGGSGGGGSGGGGSQTVVTQEPSLTVSPGGTVTLTCGSSKGAVTSGNYPNWVQQKPGQAPRGLIGGTKELAPGTPARFSGSLLGGKAALTLSGVQPEDEAEYYCTLWYSNRWVFGGGTKLTVL

SEQ ID NO: 1799 - protein, 249 aa, synthetic construct
  REGION 1..249: note = Synthetic Construct
EVQLVESGGGLVQPGGSLKLSCAASGNTFNKYAMNWVRQAPGKGLEWVARIRSKYNNYETYYADSVKDRFTISRDDSKNTAYLQMNNLKTEDTAVYYCVRHTNFGNSYISYWAYWGQGTLVTVSSGGGGSGGGGSGGGGSQTVVTQEPSLTVSPGGTVTLTCGSSTGAVTSGYYPNWVQQKPGQAPRGLIGGTYFLAPGTPARFSGSLLGGKAALTLSGVQPEDEAEYYCVLWYSNRWVFGGGTKLTVL

SEQ ID NO: 1800 - protein, 249 aa, synthetic construct
  REGION 1..249: note = Synthetic Construct
EVQLVESGGGLVQPGGSLKLSCAASGFTFNNYAMNWVRQAPGKGLEWVARIRSKYNNYATYYADAVKDRFTISRDDSKNTAYLQMNNLKTEDTAVYYCVRHGNFGNSQISYWAYWGQGTLVTVSSGGGGSGGGGSGGGGSQTVVTQEPSLTVSPGGTVTLTCGSSTGAVTDGNYPNWVQQKPGQAPRGLIGGIKFLAPGTPARFSGSLLGGKAALTLSGVQPEDEAEYYCVLWYSNRWVFGGGTKLTVL

SEQ ID NO: 1801 - protein, 249 aa, synthetic construct
  REGION 1..249: note = Synthetic Construct
EVQLVESGGGLVQPGGSLKLSCAASGFTFNKYAVNWVRQAPGKGLEWVARIRSKYNNYATYYADSVKDRFTISRDDSKNTAYLQMNNLKTEDTAVYYCVRHGNFGNSYISYWAYWGQGTLVTVSSGGGGSGGGGSGGGGSQTVVTQEPSLTVSPGGTVTLTCGESTGAVTSGNYPNWVQQKPGQAPRGLIGGTKILAPGTPARFSGSLLGGKAALTLSGVQPEDEAEYYCVLWYSNRWVFGGGTKLTVL

SEQ ID NO: 1802 - protein, 249 aa, synthetic construct
  REGION 1..249: note = Synthetic Construct
EVQLVESGGGLVQPGGSLKLSCAASGFTFNKYPMNWVRQAPGKGLEWVARIRSKYNNYATYYADSVKDRFTISRDDSKNTAYLQMNNLKNEDTAVYYCVRHGNFNNSYISYWAYWGQGTLVTVSSGGGGSGGGGSGGGGSQTVVTQEPSLTVSPGGTVTLTCGSSTGAVTKGNYPNWVQQKPGQAPRGLIGGTKMLAPGTPARFSGSLLGGKAALTLSGVQPEDEAEYYCALWYSNRWVFGGGTKLTVL

SEQ ID NO: 1803 - protein, 249 aa, synthetic construct
  REGION 1..249: note = Synthetic Construct
EVQLVESGGGLVQPGGSLKLSCAASGFTFNNYAMNWVRQAPGKGLEWVARIRSGYNNYATYYADSVKDRFTISRDDSKNTAYLQMNNLKTEDTAVYYCVRHGNFGNSYISYWAYWGQGTLVTVSSGGGGSGGGGSGGGGSQTVVTQEPSLTVSPGGTVTLTCGSYTGAVTSGNYPNWVQQKPGQAPRGLIGGTKFNAPGTPARFSGSLLGGKAALTLSGVQPEDEAEYYCVLWYANRWVFGGGTKLTVL

SEQ ID NO: 1804 - protein, 249 aa, synthetic construct
  REGION 1..249: note = Synthetic Construct
EVQLVESGGGLVQPGGSLKLSCAASGFEFNKYAMNWVRQAPGKGLEWVARIRSKYNNYETYYADSVKDRFTISRDDSKNTAYLQMNNLKTEDTAVYYCVRHGNFGNSLISYWAYWGQGTLVTVSSGGGGSGGGGSGGGGSQTVVTQEPSLTVSPGGTVTLTCGSSSGAVTSGNYPNWVQQKPGQAPRGLIGGTKFGAPGTPARFSGSLLGGKAALTLSGVQPEDEAEYYCVLWYSNRWVFGGGTKLTVL

SEQ ID NO: 1805 - protein, 249 aa, synthetic construct
  REGION 1..249: note = Synthetic Construct
EVQLVESGGGLVQPGGSLKLSCAASGFTFNKYAMNWVRQAPGKGLEWVARIRSKYNNYATYYADSVKDRFTISRDDSKNTAYLQMNNLKTEDTAVYYCVRHGNFGNSYISYWAYWGQGTLVTVSSGGGGSGGGGSGGGGSQTVVTQEPSLTVSPGGTVTLTCGSSTGAVTSGNYPNWVQQKPGQAPRGLIGGTKFLAPGTPARFSGSLLGGKAALTLSGVQPEDEAEYYCVLWYSNRWVFGGGTKLTVL

SEQ ID NO: 1806 - protein, 249 aa, synthetic construct
  REGION 1..249: note = Synthetic Construct
EVQLVESGGGLVQPGGSLKLSCAASGFTFNKYALNWVRQAPGKGLEWVARIRSKYNNYATEYADSVKDRFTISRDDSKNTAYLQMNNLKTEDTAVYYCVRHGNFGNSPISYWAYWGQGTLVTVSSGGGGSGGGGSGGGGSQTVVTQEPSLTVSPGGTVTLTCGSSTGAVTSGNYPNWVQQKPGQAPRGLIGGTNFLAPGTPERFSGSLLGGKAALTLSGVQPEDEAEYYCVLWYSNRWAFGGGTKLTVL

SEQ ID NO: 1807 - protein, 249 aa, synthetic construct
  REGION 1..249: note = Synthetic Construct
EVQLVESGGGLVQPGGSLKLSCAASGFTFNEYAMNWVRQAPGKGLEWVARIRSKYNNYATYYADDVKDRFTISRDDSKNTAYLQMNNLKTEDTAVYYCVRHGNFGNSGISYWAYWGQGTLVTVSSGGGGSGGGGSGGGGSQTVVTQEPSLTVSPGGTVTLTCGSSTGAVTVGNYPNWVQQKPGQAPRGLIGGTEFLAPGTPARFSGSLLGGKAALTLSGVQPEDEAEYYCVLWYSNRWVFGGGTKLTVL

SEQ ID NO: 1808 - protein, 9 aa, synthetic construct
  REGION 1..9: note = Synthetic Construct
GGGGSGGGS

SEQ ID NO: 1809 - protein, 20 aa, synthetic construct
  REGION 1..20: note = Synthetic Construct
  VARIANT 1..20: note = MISC_FEATURE - This sequence may encompass 1-10 GS repeating units (Amino acids 3 to 20 can be empty or absent)
GSGSGSGSGSGSGSGSGSGS

SEQ ID NO: 1810 - protein, 30 aa, synthetic construct
  REGION 1..30: note = Synthetic Construct
  VARIANT 1..30: note = MISC_FEATURE - This sequence may encompass 1-10 GGS repeating units (Amino acids 3 to 30 can be empty or absent)
GGSGGSGGSGGSGGSGGSGGSGGSGGSGGS

SEQ ID NO: 1811 - protein, 40 aa, synthetic construct
  REGION 1..40: note = Synthetic Construct
  VARIANT 1..40: note = REPEAT - This sequence may encompass 1-10 GGGS repeating units
GGGSGGGSGGGSGGGSGGGSGGGSGGGSGGGSGGGSGGGS

SEQ ID NO: 1812 - protein, 40 aa, synthetic construct
  REGION 1..40: note = Synthetic Construct
  VARIANT 1..40: note = REPEAT - This sequence may encompass 1-10 GGSG repeating units
GGSGGGSGGGSGGGSGGGSGGGSGGGSGGGSGGGSGGGSG

SEQ ID NO: 1813 - protein, 50 aa, synthetic construct
  REGION 1..50: note = Synthetic Construct
  VARIANT 1..50: note = REPEAT - This sequence may encompass 1-10 GGSGG repeating units
GGSGGGGSGGGGSGGGGSGGGGSGGGGSGGGGSGGGGSGGGGSGGGGSGG

SEQ ID NO: 1814 - protein, 50 aa, synthetic construct
  REGION 1..50: note = Synthetic Construct
  VARIANT 1..50: note = REPEAT - This sequence may encompass 1-10 GGGGS repeating units
GGGGSGGGGSGGGGSGGGGSGGGGSGGGGSGGGGSGGGGSGGGGSGGGGS

SEQ ID NO: 1815 - protein, 50 aa, synthetic construct
  REGION 1..50: note = Synthetic Construct
  VARIANT 1..50: note = REPEAT - This sequence may encompass 1-10 GGGGG repeating units
GGGGGGGGGGGGGGGGGGGGGGGGGGGGGGGGGGGGGGGGGGGGGGGGGG

SEQ ID NO: 1816 - protein, 30 aa, synthetic construct
  REGION 1..30: note = Synthetic Construct
  VARIANT 1..30: note = MISC_FEATURE - This sequence may encompass 1-10 GGG repeating units (Amino acids 3 to 30 can be empty or absent)
GGGGGGGGGGGGGGGGGGGGGGGGGGGGGG

SEQ ID NO: 1817 - protein, 20 aa, synthetic construct
  REGION 1..20: note = Synthetic Construct
GGGGSGGGGSGGGGSGGGGS

SEQ ID NO: 1818 - protein, 15 aa, synthetic construct
  REGION 1..15: note = Synthetic Construct
GGGGSGGGGSGGGGS

SEQ ID NO: 1819 - protein, 6 aa, synthetic construct
  REGION 1..6: note = Synthetic Construct
HHHHHH

SEQ ID NO: 1820 - protein, 10 aa, synthetic construct
  REGION 1..10: note = Synthetic Construct
GNTFNKYAMN

SEQ ID NO: 1821 - protein, 10 aa, synthetic construct
  REGION 1..10: note = Synthetic Construct
GFEFNKYAMN

SEQ ID NO: 1822 - protein, 10 aa, synthetic construct
  REGION 1..10: note = Synthetic Construct
GFMFNKYAMN

SEQ ID NO: 1823 - protein, 10 aa, synthetic construct
  REGION 1..10: note = Synthetic Construct
GFTYNKYAMN

SEQ ID NO: 1824 - protein, 10 aa, synthetic construct
  REGION 1..10: note = Synthetic Construct
GFTFNNYAMN

SEQ ID NO: 1825 - protein, 10 aa, synthetic construct
  REGION 1..10: note = Synthetic Construct
GFTFNGYAMN

SEQ ID NO: 1826 - protein, 10 aa, synthetic construct
  REGION 1..10: note = Synthetic Construct
GFTFNTYAMN

SEQ ID NO: 1827 - protein, 10 aa, synthetic construct
  REGION 1..10: note = Synthetic Construct
GFTFNEYAMN

SEQ ID NO: 1828 - protein, 10 aa, synthetic construct
  REGION 1..10: note = Synthetic Construct
GFTFNKYPMN

SEQ ID NO: 1829 - protein, 10 aa, synthetic construct
  REGION 1..10: note = Synthetic Construct
GFTFNKYAVN

SEQ ID NO: 1830 - protein, 10 aa, synthetic construct
  REGION 1..10: note = Synthetic Construct
GFTFNKYAIN

SEQ ID NO: 1831 - protein, 10 aa, synthetic construct
  REGION 1..10: note = Synthetic Construct
GFTFNKYALN

SEQ ID NO: 1832 - protein, 18 aa, synthetic construct
  REGION 1..18: note = Synthetic Construct
RIRSGYNNYATYYADSVK

SEQ ID NO: 1833 - protein, 18 aa, synthetic construct
  REGION 1..18: note = Synthetic Construct
RIRSKSNNYATYYADSVK

SEQ ID NO: 1834 - protein, 18 aa, synthetic construct
  REGION 1..18: note = Synthetic Construct
RIRSKYNKYATYYADSVK

SEQ ID NO: 1835 - protein, 18 aa, synthetic construct
  REGION 1..18: note = Synthetic Construct
RIRSKYNNYETYYADSVK

SEQ ID NO: 1836 - protein, 18 aa, synthetic construct
  REGION 1..18: note = Synthetic Construct
RIRSKYNNYATEYADSVK

SEQ ID NO: 1837 - protein, 18 aa, synthetic construct
  REGION 1..18: note = Synthetic Construct
RIRSKYNNYATYYKDSVK

SEQ ID NO: 1838 - protein, 18 aa, synthetic construct
  REGION 1..18: note = Synthetic Construct
RIRSKYNNYATYYADEVK

SEQ ID NO: 1839 - protein, 18 aa, synthetic construct
  REGION 1..18: note = Synthetic Construct
RIRSKYNNYATYYADAVK

SEQ ID NO: 1840 - protein, 18 aa, synthetic construct
  REGION 1..18: note = Synthetic Construct
RIRSKYNNYATYYADQVK

SEQ ID NO: 1841 - protein, 18 aa, synthetic construct
  REGION 1..18: note = Synthetic Construct
RIRSKYNNYATYYADDVK

SEQ ID NO: 1842 - protein, 14 aa, synthetic construct
  REGION 1..14: note = Synthetic Construct
HANFGNSYISYWAY

SEQ ID NO: 1843 - protein, 14 aa, synthetic construct
  REGION 1..14: note = Synthetic Construct
HTNFGNSYISYWAY

SEQ ID NO: 1844 - protein, 14 aa, synthetic construct
  REGION 1..14: note = Synthetic Construct
HGNFNNSYISYWAY

SEQ ID NO: 1845 - protein, 14 aa, synthetic construct
  REGION 1..14: note = Synthetic Construct
HGNFGDSYISYWAY

SEQ ID NO: 1846 - protein, 14 aa, synthetic construct
  REGION 1..14: note = Synthetic Construct
HGNFGNSHISYWAY

SEQ ID NO: 1847 - protein, 14 aa, synthetic construct
  REGION 1..14: note = Synthetic Construct
HGNFGNSPISYWAY

SEQ ID NO: 1848 - protein, 14 aa, synthetic construct
  REGION 1..14: note = Synthetic Construct
HGNFGNSQISYWAY

SEQ ID NO: 1849 - protein, 14 aa, synthetic construct
  REGION 1..14: note = Synthetic Construct
HGNFGNSLISYWAY

SEQ ID NO: 1850 - protein, 14 aa, synthetic construct
  REGION 1..14: note = Synthetic Construct
HGNFGNSGISYWAY

SEQ ID NO: 1851 - protein, 14 aa, synthetic construct
  REGION 1..14: note = Synthetic Construct
HGNFGNSYISYWAT

SEQ ID NO: 1852 - protein, 14 aa, synthetic construct
  REGION 1..14: note = Synthetic Construct
ASSTGAVTSGNYPN

SEQ ID NO: 1853 - protein, 14 aa, synthetic construct
  REGION 1..14: note = Synthetic Construct
GESTGAVTSGNYPN

SEQ ID NO: 1854 - protein, 14 aa, synthetic construct
  REGION 1..14: note = Synthetic Construct
GSYTGAVTSGNYPN

SEQ ID NO: 1855 - protein, 14 aa, synthetic construct
  REGION 1..14: note = Synthetic Construct
GSSFGAVTSGNYPN

SEQ ID NO: 1856 - protein, 14 aa, synthetic construct
  REGION 1..14: note = Synthetic Construct
GSSKGAVTSGNYPN

SEQ ID NO: 1857 - protein, 14 aa, synthetic construct
  REGION 1..14: note = Synthetic Construct
GSSSGAVTSGNYPN

SEQ ID NO: 1858 - protein, 14 aa, synthetic construct
  REGION 1..14: note = Synthetic Construct
GSSTGYVTSGNYPN

SEQ ID NO: 1859 - protein, 14 aa, synthetic construct
  REGION 1..14: note = Synthetic Construct
GSSTGAVVSGNYPN

SEQ ID NO: 1860 - protein, 14 aa, synthetic construct
  REGION 1..14: note = Synthetic Construct
GSSTGAVTDGNYPN

SEQ ID NO: 1861 - protein, 14 aa, synthetic construct
  REGION 1..14: note = Synthetic Construct
GSSTGAVTKGNYPN

SEQ ID NO: 1862 - protein, 14 aa, synthetic construct
  REGION 1..14: note = Synthetic Construct
GSSTGAVTHGNYPN

SEQ ID NO: 1863 - protein, 14 aa, synthetic construct
  REGION 1..14: note = Synthetic Construct
GSSTGAVTVGNYPN

SEQ ID NO: 1864 - protein, 14 aa, synthetic construct
  REGION 1..14: note = Synthetic Construct
GSSTGAVTSGYYPN

SEQ ID NO: 1865 - protein, 7 aa, synthetic construct
  REGION 1..7: note = Synthetic Construct
GIKFLAP

SEQ ID NO: 1866 - protein, 7 aa, synthetic construct
  REGION 1..7: note = Synthetic Construct
GTEFLAP

SEQ ID NO: 1867 - protein, 7 aa, synthetic construct
  REGION 1..7: note = Synthetic Construct
GTYFLAP

SEQ ID NO: 1868 - protein, 7 aa, synthetic construct
  REGION 1..7: note = Synthetic Construct
GTSFLAP

SEQ ID NO: 1869 - protein, 7 aa, synthetic construct
  REGION 1..7: note = Synthetic Construct
GTNFLAP

SEQ ID NO: 1870 - protein, 7 aa, synthetic construct
  REGION 1..7: note = Synthetic Construct
GTKLLAP

SEQ ID NO: 1871 - protein, 7 aa, synthetic construct
  REGION 1..7: note = Synthetic Construct
GTKELAP

SEQ ID NO: 1872 - protein, 7 aa, synthetic construct
  REGION 1..7: note = Synthetic Construct
GTKILAP

SEQ ID NO: 1873 - protein, 7 aa, synthetic construct
  REGION 1..7: note = Synthetic Construct
GTKMLAP

SEQ ID NO: 1874 - protein, 7 aa, synthetic construct
  REGION 1..7: note = Synthetic Construct
GTKVLAP

SEQ ID NO: 1875 - protein, 7 aa, synthetic construct
  REGION 1..7: note = Synthetic Construct
GTKFNAP

SEQ ID NO: 1876 - protein, 7 aa, synthetic construct
  REGION 1..7: note = Synthetic Construct
GTKFGAP

SEQ ID NO: 1877 - protein, 7 aa, synthetic construct
  REGION 1..7: note = Synthetic Construct
GTKFLVP

SEQ ID NO: 1878 - protein, 9 aa, synthetic construct
  REGION 1..9: note = Synthetic Construct
TLWYSNRWV

SEQ ID NO: 1879 - protein, 9 aa, synthetic construct
  REGION 1..9: note = Synthetic Construct
ALWYSNRWV

SEQ ID NO: 1880 - protein, 9 aa, synthetic construct
  REGION 1..9: note = Synthetic Construct
VLWYDNRWV

SEQ ID NO: 1881 - protein, 9 aa, synthetic construct
  REGION 1..9: note = Synthetic Construct
VLWYANRWV

SEQ ID NO: 1882 - protein, 9 aa, synthetic construct
  REGION 1..9: note = Synthetic Construct
VLWYSNSWV

SEQ ID NO: 1883 - protein, 9 aa, synthetic construct
  REGION 1..9: note = Synthetic Construct
VLWYSNRWI

SEQ ID NO: 1884 - protein, 9 aa, synthetic construct
  REGION 1..9: note = Synthetic Construct
VLWYSNRWA

SEQ ID NO: 1885 - protein, 618 aa, Homo sapiens
MVSPRMSGLLSQTVILALIFLPQTRPAGVFELQIHSFGPGPGPGAPRSPCSARLPCRLFFRVCLKPGLSEEAAESPCALGAALSARGPVYTEQPGAPAPDLPLPDGLLQVPFRDAWPGTFSFIIETWREELGDQIGGPAWSLLARVAGRRRLAAGGPWARDIQRAGAWELRFSYRARCEPPAVGTACTRLCRPRSAPSRCGPGLRPCAPLEDECEAPLVCRAGCSPEHGFCEQPGECRCLEGWTGPLCTVPVSTSSCLSPRGPSSATTGCLVPGPGPCDGNPCANGGSCSETPRSFECTCPRGFYGLRCEVSGVTCADGPCFNGGLCVGGADPDSAYICHCPPGFQGSNCEKRVDRCSLQPCRNGGLCLDLGHALRCRCRAGFAGPRCEHDLDDCAGRACANGGTCVEGGGAHRCSCALGFGGRDCRERADPCAARPCAHGGRCYAHFSGLVCACAPGYMGARCEFPVHPDGASALPAAPPGLRPGDPQRYLLPPALGLLVAAGVAGAALLLVHVRRRGHSQDAGSRLLAGTPEPSVHALPDALNNLRTQEGSGDGPSSSVDWNRPEDVDPQGIYVISAPSIYAREVATPLFPPLHTGRAGQRQHLLFPYPSSILSVK

SEQ ID NO: 1886 - protein, 117 aa, synthetic construct
  REGION 1..117: note = Synthetic Construct
EVQLVESGGGLVQPGGSLTLSCAASLSSVSVLSIAWYRQAPGKKRELVAGISTDGSTVYIDSVKGRFTISRDNAKNSVYLQMNSLRAEDTAVYYCYAYSWTTSLPYWGQGTLVTVSS

SEQ ID NO: 1887 - protein, 10 aa, synthetic construct
  REGION 1..10: note = Synthetic Construct
LSSVSVLSIA

SEQ ID NO: 1888 - protein, 16 aa, synthetic construct
  REGION 1..16: note = Synthetic Construct
GISTDGSTVYIDSVKG

SEQ ID NO: 1889 - protein, 9 aa, synthetic construct
  REGION 1..9: note = Synthetic Construct
YSWTTSLPY

SEQ ID NO: 1890 - protein, 505 aa, synthetic construct
  REGION 1..505: note = Synthetic Construct
EVQLVESGGGLVQPGGSLKLSCAASGFTFNKYAINWVRQAPGKGLEWVARIRSKYNNYATYYADQVKDRFTISRDDSKNTAYLQMNNLKTEDTAVYYCVRHANFGNSYISYWAYWGQGTLVTVSSGGGGSGGGGSGGGGSQTVVTQEPSLTVSPGGTVTLTCASSTGAVTSGNYPNWVQQKPGQAPRGLIGGTKFLVPGTPARFSGSLLGGKAALTLSGVQPEDEAEYYCTLWYSNRWVFGGGTKLTVLGGGGSGGGSEVQLVESGGGLVQPGNSLRLSCAASGFTFSKFGMSWVRQAPGKGLEWVSSISGSGRDTLYADSVKGRFTISRDNAKTTLYLQMNSLRPEDTAVYYCTIGGSLSVSSQGTLVTVSSGGGGSGGGSEVQLVESGGGLVQPGGSLTLSCAASSSSVSLLSLAWYRQAPGKKRELVAGISDDGSIVYMDSVKGRFTISRDNAKNSVYLQMNSLRAEDTAVYYCYAYSWITRSPYWGQGTLVTVSSHHHHHH

SEQ ID NO: 1891 - protein, 505 aa, synthetic construct
  REGION 1..505: note = Synthetic Construct
EVQLVESGGGLVQPGGSLTLSCAASSSSVSLLSLAWYRQAPGKKRELVAGISDDGSIVYMDSVKGRFTISRDNAKNSVYLQMNSLRAEDTAVYYCYAYSWITRSPYWGQGTLVTVSSGGGGSGGGSEVQLVESGGGLVQPGNSLRLSCAASGFTFSKFGMSWVRQAPGKGLEWVSSISGSGRDTLYADSVKGRFTISRDNAKTTLYLQMNSLRPEDTAVYYCTIGGSLSVSSQGTLVTVSSGGGGSGGGSEVQLVESGGGLVQPGGSLKLSCAASGFTFNKYAINWVRQAPGKGLEWVARIRSKYNNYATYYADQVKDRFTISRDDSKNTAYLQMNNLKTEDTAVYYCVRHANFGNSYISYWAYWGQGTLVTVSSGGGGSGGGGSGGGGSQTVVTQEPSLTVSPGGTVTLTCASSTGAVTSGNYPNWVQQKPGQAPRGLIGGTKFLVPGTPARFSGSLLGGKAALTLSGVQPEDEAEYYCTLWYSNRWVFGGGTKLTVLHHHHHH

SEQ ID NO: 1892 - protein, 618 aa, Homo sapiens; identical to SEQ ID NO: 1885

SEQ ID NO: 1893 - protein, 446 aa, synthetic construct
  REGION 1..446: note = Synthetic Construct
RSPCSARLPCRLFFRVCLKPGLSEEAAESPCALGAALSARGPVYTEQPGAPAPDLPLPDGLLQVPFRDAWPGTFSFIIETWREELGDQIGGPAWSLLARVAGRRRLAAGGPWARDIQRAGAWELRFSYRARCEPPAVGTACTRLCRPRSAPSRCGPGLRPCAPLEDECEAPLVCRAGCSPEHGFCEQPGECRCLEGWTGPLCTVPVSTSSCLSPRGPSSATTGCLVPGPGPCDGNPCANGGSCSETPRSFECTCPRGFYGLRCEVSGVTCADGPCFNGGLCVGGADPDSAYICHCPPGFQGSNCEKRVDRCSLQPCRNGGLCLDLGHALRCRCRAGFAGPRCEHDLDDCAGRACANGGTCVEGGGAHRCSCALGFGGRDCRERADPCAARPCAHGGRCYAHFSGLVCACAPGYMGARCEFPVHPDGASALPAAPPGLRPGDPQRYL

SEQ ID NO: 1894-1895 - skipped (2 entries)

SEQ ID NO: 1896 - protein, 5 aa, synthetic construct
  REGION 1..5: note = Synthetic Construct
LPETG

SEQ ID NO: 1897 - protein, 249 aa, synthetic construct
  REGION 1..249: note = Synthetic Construct
EVQLVESGGGLVQPGGSLKLSCAASGFTFNGYAMNWVRQAPGKGLEWVARIRSKYNNYATYYADEVKDRFTISRDDSKNTAYLQMNNLKTEDTAVYYCVRHGNFGNSPISYWAYWGQGTLVTVSSGGGGSGGGGSGGGGSQTVVTQEPSLTVSPGGTVTLTCGSSTGAVVSGNYPNWVQQKPGQAPRGLIGGTEFLAPGTPARFSGSLLGGKAALTLSGVQPEDEAEYYCVLWYSNRWVFGGGTKLTVL

SEQ ID NO: 1898 - protein, 249 aa, synthetic construct
  REGION 1..249: note = Synthetic Construct
EVQLVESGGGLVQPGGSLKLSCAASGNTFNKYAMNWVRQAPGKGLEWVARIRSKYNNYATYYADSVKDRFTISRDDSKNTAYLQMNNLKTEDTAVYYCVRHGNFGDSYISYWAYWGQGTLVTVSSGGGGSGGGGSGGGGSQTVVTQEPSLTVSPGGTVTLTCGSSTGAVTHGNYPNWVQQKPGQAPRGLIGGTKVLAPGTPARFSGSLLGGKAALTLSGVQPEDEAEYYCVLWYSNRWVFGGGTKLTVL

1-85. (canceled)

86. A method of treating cancer, the method comprising administration of an effective amount of a Delta Like Ligand 3 (DLL3) targeting trispecific protein to a subject,
wherein said protein comprises:
(a) a first domain (A) which specifically binds to human CD3;
(b) a second domain (B) which is a half-life extension domain; and
(c) a third domain (C) which specifically binds to DLL3,
wherein the DLL3 targeting trispecific protein is administered at a dosage of from about 45 μg to about 15,000 μg.

87. The method of claim 86, wherein the DLL3 targeting trispecific protein is administered at a dosage of from about 135 μg to about 12,000 μg.

88. The method of claim 87, wherein the DLL3 targeting trispecific protein is administered at a dosage of from about 1000 μg to about 8000 μg.

89. The method of claim 88, wherein the DLL3 targeting trispecific protein is administered at a dosage of from about 1200 μg to about 3600 μg.

90. The method of claim 89, wherein the DLL3 targeting trispecific protein is administered at a dosage of 1215 μg or 3600 μg.

91. The method of claim 86, wherein the DLL3 targeting trispecific protein is administered once a week.

92. The method of claim 86, wherein the DLL3 targeting trispecific protein is administered intravenously, intraperitoneally, subcutaneously, intramuscularly, topically or intradermally.

93. The method of claim 86, wherein the method comprises administering a first dose of the DLL3 targeting trispecific protein and a second dose of the DLL3 targeting trispecific protein, and wherein the second dose is higher than the first dose.

94. The method of claim 93, wherein the first dose of the DLL3 targeting trispecific protein is from about 1000 μg to about 3600 μg.

95. The method of claim 94, wherein the first dose of the DLL3 targeting trispecific protein is 1215 μg, 2000 μg, or 3600 μg.

96. The method of claim 93, wherein the second dose of the DLL3 targeting trispecific protein is from about 3600 μg to about 12,000 μg.

97. The method of claim 96, wherein the second dose of the DLL3 targeting trispecific protein is from about 3600 μg to about 7200 μg.

98. The method of claim 97, wherein the second dose of the DLL3 targeting trispecific protein is 3600 μg or 7200 μg.

99. The method of claim 93, wherein the first dose of the DLL3 targeting trispecific protein is 1215 μg, and wherein the second dose of the DLL3 targeting trispecific protein is 3600 μg.

100. The method of claim 93, wherein the first dose of the DLL3 targeting trispecific protein is 3600 μg, and wherein the second dose of the DLL3 targeting trispecific protein is 7200 μg.

101. The method of claim 93, wherein the method further comprises a third dose of the DLL3 trispecific protein, and wherein the third dose is higher than the second dose.

102. The method of claim 101, wherein the third dose is about 7200 μg.

103. The method of claim 93, wherein the first dose or the second dose is administered once a week.

104. The method of claim 86, wherein the third domain comprises a VHH domain, wherein the VHH domain comprises one or more sequences selected from the group consisting of SEQ ID NO: 1-442.

105. The method of claim 86, wherein the second domain binds human serum albumin and comprises a scFv, a variable heavy domain (VH), a variable light domain (VL), a peptide, a ligand, or a small molecule.

106. The method of claim 86, wherein the DLL3 targeting trispecific protein comprises a sequence selected from the group consisting of SEQ ID NOs: 1890-1891.

107. The method of claim 106, wherein the DLL3 targeting trispecific protein comprises a sequence of SEQ ID NO: 1890.

108. The method of claim 86, wherein the cancer is a neuroendocrine cancer, a prostate cancer, a lung cancer, a stomach cancer, a squamous cell carcinoma, a pancreatic cancer, a cholangiocarcinoma, a triple negative breast cancer or an ovarian cancer.

109. The method of claim 108, wherein the cancer is a small cell lung cancer or a neuroendocrine prostate cancer.

110. A method of treating cancer, the method comprising administration of an effective amount of a DLL3 targeting trispecific protein to a subject, wherein said protein comprises:
(a) a first domain (A) which specifically binds to human CD3;
(b) a second domain (B) which is a half-life extension domain; and
(c) a third domain (C) which specifically binds to DLL3,
wherein the domains are linked in the order H₂N-(A)-(B)—(C)—COOH, or by linkers L1 and L2, and wherein the DLL3 targeting trispecific protein is administered according to a schedule comprising the following steps:
(i) administration of a first dose of the DLL3 targeting trispecific protein, and
(ii) administration of a second dose of the DLL3 targeting trispecific protein,
wherein the second dose is higher than the first dose.
